(19) United States
(12) Patent Application Publication
(10) Pub. No.: US 2022/0089680 A1
(43) Pub. Date: Mar. 24, 2022

(54) MULTIMERIC T-CELL MODULATORY POLYPEPTIDES AND METHODS OF USE THEREOF

(71) Applicant: Cue Biopharma, Inc., Cambridge, MA (US)

(72) Inventors: Ronald D. Seidel, III, Cambridge, MA (US); Rodolfo J. Chaparro, Cambridge, MA (US)

(21) Appl. No.: 17/245,999

(22) Filed: Apr. 30, 2021

Related U.S. Application Data
(63) Continuation of application No. PCT/US2019/067277, filed on Dec. 18, 2019.
(60) Provisional application No. 62/782,157, filed on Dec. 19, 2018.
(60) Provisional application No. 62/814,676, filed on Mar. 6, 2019.

(51) Int. Cl. C07K 14/74; C07K 16/18; C07K 14/55; A61K 45/06

(52) U.S. Cl. CPC C07K 14/70539; C07K 16/18; C07K 14/55; A61K 38/00; C07K 2319/30; C07K 2317/74; A61K 45/06

(57) ABSTRACT

The present disclosure provides T-cell modulatory multimeric polypeptides that comprise an immunomodulatory polypeptide and that comprise an epitope-presenting alpha-feto protein peptide. A T-cell modulatory multimeric polypeptide is useful for modulating the activity of a T cell, and for modulating an immune response in an individual.

### CROSS-REFERENCE

[0001] This application claims the benefit of U.S. Provisional Patent Application No. 62/782,157, filed Dec. 19, 2018, and U.S. Provisional Patent Application No. 62/814,676, filed Mar. 6, 2019, which applications are incorporated herein by reference in their entirety.

### INTRODUCTION

[0002] An adaptive immune response involves the engagement of the T cell receptor (TCR), present on the surface of a T cell, with a small peptide antigen non-covalently presented on the surface of an antigen presenting cell (APC) by a major histocompatibility complex (MHC; also referred to in humans as a human leukocyte antigen (HLA) complex). This engagement represents the immune system's targeting mechanism and is a requisite molecular interaction for T cell modulation (activation or inhibition) and effector function. Following epitope-specific cell targeting, the targeted T cells are activated through engagement of costimulatory proteins found on the APC with counterpart costimulatory proteins the T cells. Both signals—epitope/TCR binding and engagement of APC costimulatory proteins with T cell costimulatory proteins—are required to drive cell specificity and activation or inhibition. The TCR is specific for a given epitope; however, the costimulatory protein not epitope specific and instead is generally expressed on all T cells or on large T cell subsets.

### SUMMARY

[0003] The present disclosure provides T-cell modulatory multimeric polypeptides (TMMPs) that comprise an immunomodulatory polypeptide, HLA class I polypeptides, and an alpha-feto protein peptide epitope. A TMMP is useful for modulating the activity of a T cell, and for modulating an immune response in an individual.

### BRIEF DESCRIPTION OF THE DRAWINGS

[0004] FIG. 1A-1F are schematic depictions of various TMMPs of the present disclosure.

[0005] FIG. 2A-2F are schematic depictions of various disulfide-linked TMMPs of the present disclosure.

[0006] FIG. 3 provides an amino acid sequence of an alpha-feto protein. The sequence is set forth in SEQ ID NO: 449.

[0007] FIG. 4A-4K provide amino acid sequences of exemplary polypeptide chains of TMMPs of the present disclosure. The sequences of the exemplary polypeptide chains are set forth in SEQ ID NOs: 450-460. Epitope sequences are set forth as follows: FIG. 4D: EYSRRHPQL (SEQ ID NO: 546); FIG. 4F: RSCGLFQKL (SEQ ID NO: 550); FIG. 4G: EYYLQNAFL (SEQ ID NO: 533); FIG. 4H: AYTKKAPQL (SEQ ID NO: 480); FIG. 4I: KYIQESQAL (SEQ ID NO: 526); FIG. 4J: KYIQESQAL (SEQ ID NO: 526).

[0008] FIG. 5A-5G provide amino acid sequences of immunoglobulin Fc polypeptides. The sequences are set forth in SEQ ID NOs: 461-472, respectively.

[0009] FIG. 6 provides a multiple amino acid sequence alignment of beta-2 microglobulin (β2M) precursors (i.e., including the leader sequence) from Homo sapiens (NP_004039.1; SEQ ID NO:19), Pan troglodytes (NP_001009066.1; SEQ ID NO:19), Macaca mulatta (NP_001040602.1; SEQ ID NO:20), Bos taurus (NP_776318.1; SEQ ID NO:21) and Mus musculus (NP_033865.2; SEQ ID NO:22). Amino acids 1-20 are a signal peptide.

[0010] FIG. 7A-7B depict reactivity of human PBMCs from HLA-A2 individuals to an AFP(158-166) peptide.

[0011] FIG. 8 depicts TMMP-mediated expansion of AFP/HLA-A2-specific T cells over a 10-day period.

[0012] FIG. 9A-9C provide amino acid sequences of full-length human LILA heavy chains of alleles A*0101 (SEQ ID NO: 23), A*1101 (SEQ ID NO: 24), A*2402 (SEQ ID NO: 25), and A*3303 (SEQ ID NO: 26) (FIG. 9A); full-length human HLA heavy chain of allele B*0702 (SEQ ID NO: 27) (FIG. 9B); and a full-length human HLA-C heavy chain (SEQ ID NO: 28) (FIG. 9C).

[0013] FIG. 10 provides an alignment of eleven mature MHC class I heavy chain amino acid sequences without their leader sequences, transmembrane domains, and intracellular domains. Top to bottom: SEQ ID NOs: 41-51.

[0014] FIGS. 11A-11B provide an alignment of HLA-A heavy chain amino acid sequences (FIG. 11A; SEQ ID NOs: 198-206, respectively) and a consensus sequence (FIG. 11B; SEQ ID NO: 29).

[0015] FIGS. 12A-12B provide an alignment of HLA-B heavy chain amino acid sequences (FIG. 12A; SEQ ID NOs:207-213, respectively) and a consensus sequence (FIG. 12B; SEQ ID NO: 30).

[0016] FIGS. 13A-13B provide an alignment of HLA-C heavy chain amino acid sequences (FIG. 13A; SEQ ID NOs: 214-222, respectively) and a consensus sequence (FIG. 13B; SEQ ID NO: 31).

[0017] FIG. 14 provides a consensus amino acid sequence for each of HLA-E, -F, and -G heavy chains (SEQ ID NOs: 32-34, respectively). Variable amino acid (aa) positions are indicated as “X” residues sequentially numbered; the locations of amino acids 84, 139, and 236 are double underlined.

[0018] FIG. 15 provides an alignment of consensus amino acid sequences for HLA-A (SEQ ID NO: 35), -B (SEQ ID NO: 36), -C(SEQ ID NO: 37), -E (SEQ ID NO: 38), -F (SEQ ID NO: 39), and -G (SEQ ID NO: 40).

[0019] FIG. 16A-16D provide schematic depictions of multiple disulfide-linked TMMP of the present disclosure.

[0020] FIG. 17A-17C provide amino acid sequences of double disulfide-linked TMMP of the present disclosure (FIG. 17A) and single disulfide-linked TMMP of the present disclosure (FIGS. 17B and 17C). The sequences are set forth in SEQ ID NOs: 473-478. Epitope sequences are set forth as follows: FIG. 17A: FMNKFIYEI (SEQ ID NO: 483); FIG. 17B: FMNKFIYEI (SEQ ID NO: 483); FIG. 17C: FMNKFIYEI (SEQ ID NO: 483).

[0021] FIG. 18 depicts expression and stability data for an AFP epitope-containing TMMP of the present disclosure.

[0022] FIG. 19 depicts the effect of an AFP epitope-containing TMMP of the present disclosure on proliferation of human peripheral blood mononuclear cells (PBMCs).

[0023] FIG. 20A-20C provide schematic depictions of examples of configurations of disulfide-linked TMMPs of the present disclosure.

[0024] FIG. 21 provide schematic depictions of examples of positions of immunomodulatory polypeptides in TMMPs of the present disclosure.

### DEFINITIONS

[0025] The terms “polynucleotide” and “nucleic acid,” used interchangeably herein, refer to a polymeric form of nucleotides of any length, either ribonucleotides or deoxyribonucleotides. Thus, this term includes, but is not limited, to, single-, double-, or multi-stranded DNA or RNA, genomic DNA, cDNA, DNA-RNA hybrids, or a polymer comprising purine and pyrimidine bases or other natural, chemically or biochemically modified, non-natural, or derivatized nucleotide bases.

[0026] The terms “peptide,” “polypeptide,” and “protein” are used interchangeably herein, and refer to a polymeric form of amino acids of any length, which can include coded and non-coded amino acids, chemically or biochemically modified or derivatized amino acids, and polypeptides having modified peptide backbones.

[0027] A polynucleotide or polypeptide has a certain percent “sequence identity” to another polynucleotide or polypeptide, meaning that, when aligned, that percentage of bases or amino acids are the same, and in the same relative position, when comparing the two sequences. Sequence identity can be determined in a number of different ways. To determine sequence identity, sequences can be aligned using various convenient methods and computer programs (e.g., BLAST, T-COFFEE, MUSCLE, MAFFT, etc.), available over the world wide web at sites including ncbi.nlm.nili.gov/BLAST, ebi.ac.uk/Tools/msa/tcoffee/, ebi.ac.uk/Tools/msa/muscle/, mafft.cbrc.jp/alignment/software/. See, e.g., Altschul et al. (1990), J. Mol. Bioi. 215:403-10.

[0028] The term “conservative amino acid substitution” refers to the interchangeability in proteins of amino acid residues having similar side chains. For example, a group of amino acids having aliphatic side chains consists of glycine, alanine, valine, leucine, and isoleucine; a group of amino acids having aliphatic-hydroxyl side chains consists of serine and threonine; a group of amino acids having amide containing side chains consisting of asparagine and glutamine; a group of amino acids having aromatic side chains consists of phenylalanine, tyrosine, and tryptophan; a group of amino acids having basic side chains consists of lysine, arginine, and histidine; a group of amino acids having acidic side chains consists of glutamate and aspartate; and a group of amino acids having sulfur containing side chains consists of cysteine and methionine. Exemplary conservative amino acid substitution groups are: valine-leucine-isoleucine, phenylalanine-tyrosine, lysine-arginine, alanine-valine-glycine, and asparagine-glutamine.

[0029] The term “immunological synapse” or “immune synapse” as used herein generally refers to the natural interface between two interacting immune cells of an adaptive immune response including, e.g., the interface between an antigen-presenting cell (APC) or target cell and an effector cell, e.g., a lymphocyte, an effector T cell, a natural killer cell, and the like. An immunological synapse between an APC and a T cell is generally initiated by the interaction of a T cell antigen receptor and major histocompatibility complex molecules, e.g., as described in Bromley et al., Annu Rev Immunol. 2001; 19:375-96; the disclosure of which is incorporated herein by reference in its entirety.

[0030] “T cell” includes all types of immune cells expressing CD3, including T-helper cells (CD4⁺ cells), cytotoxic T-cells (CD8⁺ cells), T-regulatory cells (Treg), and NK-T cells.

[0031] The term “immunomodulatory polypeptide” (also referred to as a “co-stimulatory polypeptide”), as used herein, includes a polypeptide on an antigen presenting cell (APC) (e.g., a dendritic cell, a B cell, and the like) that specifically binds a cognate co-immunomodulatory polypeptide on a T cell, thereby providing a signal which, in addition to the primary signal provided by, for instance, binding of a TCR/CD3 complex with a major histocompatibility complex (MHC) polypeptide loaded with peptide, mediates a T cell response, including, but not limited to, proliferation, activation, differentiation, and the like. An immunomodulatory polypeptide can include, but is not limited to, CD7, B7-1 (CD80), B7-2 (CD86), PD-L1, PD-L2, 4-1BBL, OX40L, Fas ligand (FasL), inducible costimulatory ligand (ICOS-L), intercellular adhesion molecule (ICAM), CD30L, CD40, CD70, CD83, HLA-G, MICA, MICB, HVEM, lymphotoxin beta receptor, 3/TR6, ILT3, ILT4, HVEM, an agonist or antibody that binds Toll ligand receptor and a ligand that specifically binds with B7-H3.

[0032] As noted above, an “immunomodulatory polypeptide” (also referred to herein as a “MOD”) specifically binds a cognate co-immunomodulatory polypeptide on a T cell.

[0033] An “immunomodulatory domain” (“MOD”) of a TMMP of the present disclosure binds a cognate co-immunomodulatory polypeptide, which may be present on a target T cell.

[0034] “Heterologous,” as used herein, means a nucleotide or polypeptide that is not found in the native nucleic acid or protein, respectively.

[0035] “Recombinant,” as used herein, means that a particular nucleic acid (DNA or RNA) is the product of various combinations of cloning, restriction, polymerase chain reaction (PCR) and/or ligation steps resulting in a construct having a structural coding or non-coding sequence distinguishable from endogenous nucleic acids found in natural systems. DNA sequences encoding polypeptides can be assembled from cDNA fragments or from a series of synthetic oligonucleotides, to provide a synthetic nucleic acid which is capable of being expressed from a recombinant transcriptional unit contained in a cell or in a cell-free transcription and translation system.

[0036] The terms “recombinant expression vector,” or “DNA construct” are used interchangeably herein to refer to a DNA molecule comprising a vector and at least one insert. Recombinant expression vectors are usually generated for the purpose of expressing and/or propagating the insert(s), or for the construction of other recombinant nucleotide sequences. The insert(s) may or may not be operably linked to a promoter sequence and may or may not be operably linked to DNA regulatory sequences.

[0037] As used herein, the term “affinity” refers to the equilibrium constant for the reversible binding of two agents (e.g., an antibody and an antigen) and is expressed as a dissociation constant (K_{D}). Affinity can be at least 1-fold greater, at least 2-fold greater, at least 3-fold greater, at least 4-fold greater, at least 5-fold greater, at least 6-fold greater, at least 7-fold greater, at least 8-fold greater, at least 9-fold greater, at least 10-fold greater, at least 20-fold greater, at least 30-fold greater, at least 40-fold greater, at least 50-fold greater, at least 60-fold greater, at least 70-fold greater, at least 80-fold greater, at least 90-fold greater, at least 100-fold greater, or at least 1,000-fold greater, or more, than the affinity of an antibody for unrelated amino acid sequences. Affinity of an antibody to a target protein can be, for example, from about 100 nanomolar (nM) to about 0.1 nM, from about 100 nM to about 1 picomolar (pM), or from about 100 nM to about 1 femtomolar (fM) or more. As used herein, the term “avidity” refers to the resistance of a complex of two or more agents to dissociation after dilution. The terms “immunoreactive” and “preferentially binds” are used interchangeably herein with respect to antibodies and/or antigen-binding fragments.

[0038] The term “binding,” as used herein (e.g. with reference to binding of a TMMP to a polypeptide (e.g., a T-cell receptor) on a T cell), refers to a non-covalent interaction between two molecules. Non-covalent binding refers to a direct association between two molecules, due to, for example, electrostatic, hydrophobic, ionic, and/or hydrogen-bond interactions, including interactions such as salt bridges and water bridges. Non-covalent binding interactions are generally characterized by a dissociation constant (K_{D}) of less than 10⁻⁶ M, less than 10⁻⁷ M, less than 10⁻⁸ M, less than 10⁻⁹ M, less than 10⁻¹⁰ M, less than 10⁻¹¹ M, less than 10¹² M, less than 10¹³ M, less than 10⁻¹⁴ M, or less than 10⁻¹⁵ M. “Affinity” refers to the strength of non-covalent binding, increased binding affinity being correlated with a lower K_{D}. “Specific binding” generally refers to binding with an affinity of at least about 10⁷ M or greater, e.g., 5×10⁻⁷ M, 10⁻⁸ M, 5×10⁻⁸ M, 10⁻⁹M, and greater. “Non-specific binding” generally refers to binding (e.g., the binding of a ligand to a moiety other than its designated binding site or receptor) with an affinity of less than about 10⁻⁷ M (e.g., binding with an affinity of 10⁻⁶ M, 10⁻⁵ M, 10⁻⁴ M). However, in some contexts, e.g., binding between a TCR and a peptide/MHC complex, “specific binding” can be in the range of from 1 μM to 100 μM, or from 100 μM to 1 mM. “Covalent binding” or “covalent bond,” as used herein, refers to the formation of one or more covalent chemical binds between two different molecules.

[0039] The terms “treatment”, “treating” and the like are used herein to generally mean obtaining a desired pharmacologic and/or physiologic effect. The effect may be prophylactic in terms of completely or partially preventing a disease or symptom thereof and/or may be therapeutic in terms of a partial or complete cure for a disease and/or adverse effect attributable to the disease. “Treatment” as used herein covers any treatment of a disease or symptom in a mammal, and includes: (a) preventing the disease or symptom from occurring in a subject which may be predisposed to acquiring the disease or symptom but has not yet been diagnosed as having it; (b) inhibiting the disease or symptom, i.e., arresting its development; and/or (c) relieving the disease, i.e., causing regression of the disease. The therapeutic agent may be administered before, during or after the onset of disease or injury. The treatment of ongoing disease, where the treatment stabilizes or reduces the undesirable clinical symptoms of the patient, is of particular interest. Such treatment is desirably performed prior to complete loss of function in the affected tissues. The subject therapy will desirably be administered during the symptomatic stage of the disease, and in some cases after the symptomatic stage of the disease.

[0040] The terms “individual,” “subject,” “host,” and “patient,” are used interchangeably herein and refer to any mammalian subject for whom diagnosis, treatment, or therapy is desired. Mammals include, e.g., humans, non-human primates, rodents (e.g., rats; mice), lagomorphs (e.g., rabbits), ungulates (e.g., cows, sheep, pigs, horses, goats, and the like), etc.

[0041] Before the present invention is further described, it is to be understood that this invention is not limited to particular embodiments described, as such may, of course, vary. It is also to be understood that the terminology used herein is for the purpose of describing particular embodiments only, and is not intended to be limiting, since the scope of the present invention will be limited only by the appended claims.

[0042] Where a range of values is provided, it is understood that each intervening value, to the tenth of the unit of the lower limit unless the context clearly dictates otherwise, between the upper and lower limit of that range and any other stated or intervening value in that stated range, is encompassed within the invention. The upper and lower limits of these smaller ranges may independently be included in the smaller ranges, and are also encompassed within the invention, subject to any specifically excluded limit in the stated range. Where the stated range includes one or both of the limits, ranges excluding either or both of those included limits are also included in the invention.

[0043] Unless defined otherwise, all technical and scientific terms used herein have the same meaning as commonly understood by one of ordinary skill in the art to which this invention belongs. Although any methods and materials similar or equivalent to those described herein can also be used in the practice or testing of the present invention, the preferred methods and materials are now described. All publications mentioned herein are incorporated herein by reference to disclose and describe the methods and/or materials in connection with which the publications are cited.

[0044] It must be noted that as used herein and in the appended claims, the singular forms “a,” “an,” and “the” include plural referents unless the context clearly dictates otherwise. Thus, for example, reference to a “T-cell modulatory multimeric polypeptide” includes a plurality of such polypeptides and reference to “the immunomodulatory polypeptide” includes reference to one or more immunomodulatory polypeptides and equivalents thereof known to those skilled in the art, and so forth. It is further noted that the claims may be drafted to exclude any optional element. As such, this statement is intended to serve as antecedent basis for use of such exclusive terminology as “solely,” “only” and the like in connection with the recitation of claim elements, or use of a “negative” limitation.

[0045] It is appreciated that certain features of the invention, which are, for clarity, described in the context of separate embodiments, may also be provided in combination in a single embodiment. Conversely, various features of the invention, which are, for brevity, described in the context of a single embodiment, may also be provided separately or in any suitable sub-combination. All combinations of the embodiments pertaining to the invention are specifically embraced by the present invention and are disclosed herein just as if each and every combination was individually and explicitly disclosed. In addition, all sub-combinations of the various embodiments and elements thereof are also specifically embraced by the present invention and are disclosed herein just as if each and every such sub-combination was individually and explicitly disclosed herein.

[0046] The publications discussed herein are provided solely for their disclosure prior to the filing date of the present application. Nothing herein is to be construed as an admission that the present invention is not entitled to antedate such publication by virtue of prior invention. Further, the dates of publication provided may be different from the actual publication dates which may need to be independently confirmed.

### DETAILED DESCRIPTION

[0047] The present disclosure provides T-cell modulatory multimeric polypeptides that comprise an immunomodulatory polypeptide and that comprise an epitope-presenting alpha-feto protein (AFP) peptide. A TMMP is useful for modulating the activity of a T cell, and for modulating an immune response in an individual.

### T-Cell Modulatory Multimeric Polypeptides

[0048] The present disclosure provides a T-cell modulatory multimeric polypeptide (TMMP) comprising: a) a first polypeptide; and b) a second polypeptide, wherein the TMMP comprises an epitope; a first major histocompatibility complex (MHC) polypeptide; a second MHC polypeptide; one or more immunomodulatory polypeptides; and optionally an immunoglobulin (Ig) Fc polypeptide or a non-Ig scaffold. The present disclosure provides a TMMP, wherein the TMMP is a heterodimer comprising: a) a first polypeptide comprising a first MHC polypeptide; and b) a second polypeptide comprising a second MHC polypeptide, wherein the first polypeptide or the second polypeptide comprises an epitope (e.g., a peptide that presents an epitope); wherein the first polypeptide and/or the second polypeptide comprises one or more immunomodulatory polypeptides that can be the same or different; and optionally an Ig Fc polypeptide or a non-Ig scaffold. A TMMP of the present disclosure is also referred to herein as a “multimeric polypeptide of the present disclosure” or a “synTac.” In some cases, the peptide epitope present in a TMMP of the present disclosure is an alpha-feto protein (AFP) peptide.

[0049] The present disclosure provides a TMMP comprising a heterodimeric polypeptide comprising: a) a first polypeptide comprising: i) a peptide epitope; and ii) a first MHC polypeptide; b) a second polypeptide comprising a second MHC polypeptide; and c) at least one immunomodulatory polypeptide, where the first and/or the second polypeptide comprises the at least one (i.e., one or more) immunomodulatory polypeptide. Optionally, the first or the second polypeptide comprises an Ig Fc polypeptide or a non-Ig scaffold. At least one of the one or more immunomodulatory polypeptides is a variant immunomodulatory polypeptide that exhibits reduced affinity to a cognate co-immunomodulatory polypeptide compared to the affinity of a corresponding wild-type immunomodulatory polypeptide for the cognate co-immunomodulatory polypeptide. The epitope present in a TMMP of the present disclosure binds to a T-cell receptor (TCR) on a T cell with an affinity of at least 100 μM (e.g., at least 10 μM, at least 1 μM, at least 100 nM, at least 10 nM, or at least 1 nM). A TMMP of the present disclosure binds to a first T cell with an affinity that is at least 25% higher than the affinity with which the TMMP binds a second T cell, where the first T cell expresses on its surface the cognate co-immunomodulatory polypeptide and a TCR that binds the epitope with an affinity of at least 100 μM, and where the second T cell expresses on its surface the cognate co-immunomodulatory polypeptide but does not express on its surface a TCR that binds the epitope with an affinity of at least 100 μM (e.g., at least 10 μM, at least 1 μM, at least 100 nM, at least 10 nM, or at least 1 nM). In some cases, the peptide epitope present in a TMMP of the present disclosure is an AFP peptide.

[0050] The present disclosure provides a TMMP, wherein the TMMP is:

[0051] A) a heterodimer comprising: a) a first polypeptide comprising a first MHC polypeptide; and b) a second polypeptide comprising a second MHC polypeptide, wherein the first polypeptide or the second polypeptide comprises an epitope; wherein the first polypeptide and/or the second polypeptide comprises one or more immunomodulatory polypeptides that can be the same or different, and wherein at least one of the one or more immunomodulatory polypeptides may be a wild-type immunomodulatory polypeptide or a variant of a wild-type immunomodulatory polypeptide, wherein the variant immunomodulatory polypeptide comprises 1, 2, 3, 4, 5, 6, 7, 8, 9, 10, 11, 12, 13, 14, 15, 16, 17, 18, 19, or 20 amino acid substitutions compared to the amino acid sequence of the corresponding wild-type immunomodulatory polypeptide; and wherein the first polypeptide or the second polypeptide optionally comprises an Ig Fc polypeptide or a non-Ig scaffold; or

[0052] B) a heterodimer comprising: a) a first polypeptide comprising a first MHC polypeptide; and b) a second polypeptide comprising a second MHC polypeptide, wherein the first polypeptide or the second polypeptide comprises an epitope; wherein the first polypeptide and/or the second polypeptide comprises one or more immunomodulatory polypeptides that can be the same or different,

[0053] wherein at least one of the one or more immunomodulatory polypeptides is a variant of a wild-type immunomodulatory polypeptide, wherein the variant immunomodulatory polypeptide comprises 1, 2, 3, 4, 5, 6, 7, 8, 9, 10, 11, 12, 13, 14, 15, 16, 17, 18, 19, or 20 amino acid substitutions compared to the amino acid sequence of the corresponding wild-type immunomodulatory polypeptide,

[0054] wherein at least one of the one or more immunomodulatory domains is a variant immunomodulatory polypeptide that exhibits reduced affinity to a cognate co-immunomodulatory polypeptide compared to the affinity of a corresponding wild-type immunomodulatory polypeptide for the cognate co-immunomodulatory polypeptide, and wherein the epitope binds to a TCR on a T cell with an affinity of at least 10⁻⁷ M, such that: i) the TMMP polypeptide binds to a first T cell with an affinity that is at least 25% higher than the affinity with which the TMMP binds a second T cell, wherein the first T cell expresses on its surface the cognate co-immunomodulatory polypeptide and a TCR that binds the epitope with an affinity of at least 10⁻⁷ M, and wherein the second T cell expresses on its surface the cognate co-immunomodulatory polypeptide but does not express on its surface a TCR that binds the epitope with an affinity of at least 10⁻⁷ M; and/or ii) the ratio of the binding affinity of a control TMMP, wherein the control comprises a wild-type immunomodulatory polypeptide, to a cognate co-immunomodulatory polypeptide to the binding affinity of the TMMP comprising a variant of the wild-type immunomodulatory polypeptide to the cognate co-immunomodulatory polypeptide, when measured by bio-layer interferometry, is in a range of from 1.5:1 to 10⁶:1; and wherein the variant immunomodulatory polypeptide comprises 1, 2, 3, 4, 5, 6, 7, 8, 9, 10, 11, 12, 13, 14, 15, 16, 17, 18, 19, or 20 amino acid substitutions compared to the amino acid sequence of the corresponding wild-type immunomodulatory polypeptide; and

[0055] wherein the first polypeptide or the second polypeptide optionally comprises an Ig Fc polypeptide or a non-Ig scaffold; or

[0056] C) a heterodimer comprising: a) a first polypeptide comprising, in order from N-terminus to C-terminus: i) an epitope; ii) a first MHC polypeptide; and b) a second polypeptide comprising, in order from N-terminus to C-terminus: i) a second MHC polypeptide; and ii) optionally an immunoglobulin (Ig) Fc polypeptide or a non-Ig scaffold, wherein the TMMP comprises one or more immunomodulatory domains that can be the same or different, wherein at least one of the one or more immunomodulatory domain is: A) at the C-terminus of the first polypeptide; B) at the N-terminus of the second polypeptide; C) at the C-terminus of the second polypeptide; or D) at the C-terminus of the first polypeptide and at the N-terminus of the second polypeptide, and wherein at least one of the one or more immunomodulatory domains may be a wild-type immunomodulatory polypeptide or a variant of a wild-type immunomodulatory polypeptide, wherein the variant immunomodulatory polypeptide comprises 1, 2, 3, 4, 5, 6, 7, 8, 9, 10, 11, 12, 13, 14, 15, 16, 17, 18, 19, or 20 amino acid substitutions compared to the amino acid sequence of the corresponding wild-type immunomodulatory polypeptide; and

[0057] optionally wherein at least one of the one or more immunomodulatory domains is a variant immunomodulatory polypeptide that exhibits reduced affinity to a cognate co-immunomodulatory polypeptide compared to the affinity of a corresponding wild-type immunomodulatory polypeptide for the cognate co-immunomodulatory polypeptide, and wherein the epitope binds to a TCR on a T cell with an affinity of at least 10⁻⁷ M, such that: i) the TMMP binds to a first T cell with an affinity that is at least 25% higher than the affinity with which the TMMP binds a second T cell, wherein the first T cell expresses on its surface the cognate co-immunomodulatory polypeptide and a TCR that binds the epitope with an affinity of at least 10⁻⁷ M, and wherein the second T cell expresses on its surface the cognate co-immunomodulatory polypeptide but does not express on its surface a TCR that binds the epitope with an affinity of at least 10⁻⁷ M; and/or ii) the ratio of the binding affinity of a control TMMP, wherein the control comprises a wild-type immunomodulatory polypeptide, to a cognate co-immunomodulatory polypeptide to the binding affinity of the TMMP comprising a variant of the wild-type immunomodulatory polypeptide to the cognate co-immunomodulatory polypeptide, when measured by bio-layer interferometry, is in a range of from 1.5:1 to 10⁶:1; and wherein the variant immunomodulatory polypeptide comprises 1, 2, 3, 4, 5, 6, 7, 8, 9, 10, 11, 12, 13, 14, 15, 16, 17, 18, 19, or 20 amino acid substitutions compared to the amino acid sequence of the corresponding wild-type immunomodulatory polypeptide. In some cases, the peptide epitope present in a TMMP of the present disclosure is an AFP peptide.

[0058] The present disclosure provides a TMMP comprising: a) a first polypeptide comprising, in order from N-terminus to C-terminus: i) an epitope; ii) a first MHC polypeptide; and b) a second polypeptide comprising, in order from N-terminus to C-terminus: i) a second MHC polypeptide; and ii) optionally an Ig Fc polypeptide or a non-Ig scaffold. A TMMP of the present disclosure comprises one or more immunomodulatory polypeptides, wherein at least one of the one or more immunomodulatory polypeptides is: A) at the C-terminus of the first polypeptide; B) at the N-terminus of the second polypeptide; C) at the C-terminus of the second polypeptide; or D) at the C-terminus of the first polypeptide and at the N-terminus of the second polypeptide. At least one of the one or more immunomodulatory polypeptides is a variant immunomodulatory polypeptide that exhibits reduced affinity to a cognate co-immunomodulatory polypeptide compared to the affinity of a corresponding wild-type immunomodulatory polypeptide for the cognate co-immunomodulatory polypeptide. The epitope present in a TMMP of the present disclosure binds to a T-cell receptor (TCR) on a T cell with an affinity of at least 100 μM (e.g., at least 10 μM, at least 1 μM, at least 100 nM, at least 10 nM, or at least 1 nM). A TMMP of the present disclosure binds to a first T cell with an affinity that is at least 25% higher than the affinity with which the TMMP binds a second T cell, where the first T cell expresses on its surface the cognate co-immunomodulatory polypeptide and a TCR that binds the epitope with an affinity of at least 100 μM, and where the second T cell expresses on its surface the cognate co-immunomodulatory polypeptide but does not express on its surface a TCR that binds the epitope with an affinity of at least 100 μM (e.g., at least 10 μM, at least 1 μM, at least 100 nM, at least 10 nM, or at least 1 nM).

[0059] In some cases, the epitope present in a TMMP of the present disclosure binds to a TCR on a T cell with an affinity of from about 10⁻⁴ M to about 5×10⁻⁴ M, from about 5×10⁻⁴ M to about 10⁻⁵ M, from about 10⁻⁵ M to 5×10⁻⁵ M, from about 5×10⁻⁵ M to 10⁻⁶ M, from about 10⁻⁶ M to about 5×10⁻⁶ M, from about 5×10⁻⁶ M to about 10⁻⁷ M, from about 10⁻⁷ M to about 5×10⁻⁷ M, from about 5×10⁻⁷ M to about 10⁻⁸ M, or from about 10⁻⁸ M to about 10⁻⁹ M. Expressed another way, in some cases, the epitope present in a TMMP of the present disclosure binds to a TCR on a T cell with an affinity of from about 1 nM to about 5 nM, from about 5 nM to about 10 nM, from about 10 nM to about 50 nM, from about 50 nM to about 100 nM, from about 0.1 μM to about 0.5 μM, from about 0.5 μM to about 1 μM, from about 1 μM to about 5 μM, from about 5 μM to about 10 μM, from about 10 μM to about 25 μM, from about 25 μM to about 50 μM, from about 50 μM to about 75 μM, from about 75 μM to about 100 μM.

[0060] An immunomodulatory polypeptide present in a TMMP of the present disclosure binds to its cognate co-immunomodulatory polypeptide with an affinity that it at least 10% less, at least 15% less, at least 20% less, at least 25% less, at least 30% less, at least 35% less, at least 40% less, at least 45% less, at least 50% less, at least 55% less, at least 60% less, at least 65% less, at least 70% less, at least 75% less, at least 80% less, at least 85% less, at least 90% less, at least 95% less, or more than 95% less, than the affinity of a corresponding wild-type immunomodulatory polypeptide for the cognate co-immunomodulatory polypeptide.

[0061] In some cases, a variant immunomodulatory polypeptide present in a TMMP of the present disclosure has a binding affinity for a cognate co-immunomodulatory polypeptide that is from 1 nM to 100 nM, or from 100 nM to 100 nM. For example, in some cases, a variant immunomodulatory polypeptide present in a TMMP of the present disclosure has a binding affinity for a cognate co-immunomodulatory polypeptide that is from about 100 nM to 150 nM, from about 150 nM to about 200 nM, from about 200 nM to about 250 nM, from about 250 nM to about 300 nM, from about 300 nM to about 350 nM, from about 350 nM to about 400 nM, from about 400 nM to about 500 nM, from about 500 nM to about 600 nM, from about 600 nM to about 700 nM, from about 700 nM to about 800 nM, from about 800 nM to about 900 nM, from about 900 nM to about 1 μM, to about 1 μM to about 5 μM, from about 5 μM to about 10 μM, from about 10 μM to about 15 μM, from about 15 μM to about 20 μM, from about 20 μM to about 25 μM, from about 25 μM to about 50 μM, from about 50 μM to about 75 μM, or from about 75 μM to about 100 μM. In some cases, a variant immunomodulatory polypeptide present in a TMMP of the present disclosure has a binding affinity for a cognate co-immunomodulatory polypeptide that is from about 1 nM to about 5 nM, from about 5 nM to about 10 nM, from about 10 nM to about 50 nM, from about 50 nM to about 100 nM.

[0062] The combination of the reduced affinity of the immunomodulatory polypeptide for its cognate co-immunomodulatory polypeptide, and the affinity of the epitope for a TCR, provides for enhanced selectivity of a TMMP of the present disclosure. For example, a TMMP of the present disclosure binds selectively to a first T cell that displays both: i) a TCR specific for the epitope present in the TMMP; and ii) a co-immunomodulatory polypeptide that binds to the immunomodulatory polypeptide present in the TMMP, compared to binding to a second T cell that displays: i) a TCR specific for an epitope other than the epitope present in the TMMP; and ii) a co-immunomodulatory polypeptide that binds to the immunomodulatory polypeptide present in the TMMP. For example, a TMMP of the present disclosure binds to the first T cell with an affinity that is at least 10%, at least 15%, at least 20%, at least 25%, at least 30%, at least 40%, at least 50%, at least 60%, at least 70%, at least 80%, at least 90%, at least 2-fold, at least 2.5-fold, at least 5-fold, at least 10-fold, at least 15-fold, at least 20-fold, at least 25-fold, at least, 50-fold, at least 100-fold, or more than 100-fold, higher than the affinity to which it binds the second T cell.

[0063] In some cases, a TMMP of the present disclosure, when administered to an individual in need thereof, induces both an epitope-specific cell response and an epitope non-specific T cell response. In other words, in some cases, a TMMP of the present disclosure, when administered to an individual in need thereof, induces an epitope-specific T cell response by modulating the activity of a first T cell that displays both: i) a TCR specific for the epitope present in the TMMP; ii) a co-immunomodulatory polypeptide that binds to the immunomodulatory polypeptide present in the TMMP; and induces an epitope non-specific T cell response by modulating the activity of a second T cell that displays: i) a TCR specific for an epitope other than the epitope present in the TMMP; and ii) a co-immunomodulatory polypeptide that binds to the immunomodulatory polypeptide present in the TMMP. The ratio of the epitope-specific T cell response to the epitope-non-specific T cell response is at least 2:1, at least 5:1, at least 10:1, at least 15:1, at least 20:1, at least 25:1, at least 50:1, or at least 100:1. The ratio of the epitope-specific T cell response to the epitope-non-specific T cell response is from about 2:1 to about 5:1, from about 5:1 to about 10:1, from about 10:1 to about 15:1, from about 15:1 to about 20:1, from about 20:1 to about 25:1, from about 25:1 to about 50:1, or from about 50:1 to about 100:1, or more than 100:1. “Modulating the activity” of a T cell can include one or more of: i) activating a cytotoxic (e.g., CD8⁺) T cell; ii) inducing cytotoxic activity of a cytotoxic (e.g., CD8⁺) T cell; iii) inducing production and release of a cytotoxin (e.g., a perforin; a granzyme; a granulysin) by a cytotoxic (e.g., CD8⁺) T cell; iv) inhibiting activity of an autoreactive T cell; and the like.

[0064] The combination of the reduced affinity of the immunomodulatory polypeptide for its cognate co-immunomodulatory polypeptide, and the affinity of the epitope for a TCR, provides for enhanced selectivity of a TMMP of the present disclosure. Thus, for example, a TMMP of the present disclosure binds with higher avidity to a first T cell that displays both: i) a TCR specific for the epitope present in the TMMP; and ii) a co-immunomodulatory polypeptide that binds to the immunomodulatory polypeptide present in the TMMP, compared to the avidity to which it binds to a second T cell that displays: i) a TCR specific for an epitope other than the epitope present in the TMMP; and ii) a co-immunomodulatory polypeptide that binds to the immunomodulatory polypeptide present in the TMMP.

[0065] Binding affinity between an immunomodulatory polypeptide and its cognate co-immunomodulatory polypeptide can be determined by bio-layer interferometry (BLI) using purified immunomodulatory polypeptide and purified cognate co-immunomodulatory polypeptide. Binding affinity between a TMMP and its cognate co-immunomodulatory polypeptide can be determined by BLI using purified TMMP and the cognate co-immunomodulatory polypeptide. BLI methods are well known to those skilled in the art. See, e.g., Lad et al. (2015) J. Biomol. Screen. 20(4):498-507; and Shah and Duncan (2014) J. Vis. Exp. 18:e51383.

[0066] A BLI assay can be carried out using an Octet RED 96 (Pal FortéBio) instrument, or a similar instrument, as follows. A TMMP (e.g., a TMMP of the present disclosure; a control TMMP (where a control TMMP comprises a wild-type immunomodulatory polypeptide)) is immobilized onto an insoluble support (a “biosensor”). The immobilized TMMP is the “target.” Immobilization can be effected by immobilizing a capture antibody onto the insoluble support, where the capture antibody immobilizes the TMMP. For example, immobilization can be effected by immobilizing anti-Fc (e.g., anti-human IgG Fc) antibodies onto the insoluble support, where the immobilized anti-Fc antibodies bind to and immobilize the TMMP (where the TMMP comprises an IgFc polypeptide). A co-immunomodulatory polypeptide is applied, at several different concentrations, to the immobilized TMMP, and the instrument's response recorded. Assays are conducted in a liquid medium comprising 25 mM HEPES pH 6.8, 5% poly(ethylene glycol) 6000, 50 mM KCl, 0.1% bovine serum albumin, and 0.02% Tween 20 nonionic detergent. Binding of the co-immunomodulatory polypeptide to the immobilized TMMP is conducted at 30° C. As a positive control for binding affinity, an anti-MHC Class I monoclonal antibody can be used. For example, anti-HLA Class I monoclonal antibody W6/32 (American Type Culture Collection No. HB-95; Parham et al. (1979) J. Immunol. 123:342), which has a K_{D} of 7 nM, can be used. A standard curve can be generated using serial dilutions of the anti-MHC Class I monoclonal antibody. The co-immunomodulatory polypeptide, or the anti-MHC Class I mAb, is the “analyte.” BLI analyzes the interference pattern of white light reflected from two surfaces: i) from the immobilized polypeptide (“target”); and ii) an internal reference layer. A change in the number of molecules (“analyte”; e.g., co-immunomodulatory polypeptide; anti-HLA antibody) bound to the biosensor tip causes a shift in the interference pattern; this shift in interference pattern can be measured in real time. The two kinetic terms that describe the affinity of the target/analyte interaction are the association constant (kₐ) and dissociation constant (k_{d}). The ratio of these two terms (k_{d/a}) gives rise to the affinity constant K_{D}.

[0067] The BLI assay is carried out in a multi-well plate. To run the assay, the plate layout is defined, the assay steps are defined, and biosensors are assigned in Octet Data Acquisition software. The biosensor assembly is hydrated. The hydrated biosensor assembly and the assay plate are equilibrated for 10 minutes on the Octet instrument. Once the data are acquired, the acquired data are loaded into the Octet Data Analysis software. The data are processed in the Processing window by specifying method for reference subtraction, y-axis alignment, inter-step correction, and Savitzky-Golay filtering. Data are analyzed in the Analysis window by specifying steps to analyze (Association and Dissociation), selecting curve fit model (1:1), fitting method (global), and window of interest (in seconds). The quality of fit is evaluated. K_{D} values for each data trace (analyte concentration) can be averaged if within a 3-fold range. K_{D} error values should be within one order of magnitude of the affinity constant values; R² values should be above 0.95. See, e.g., Abdiche et al. (2008) J. Anal. Biochem. 377:209.

[0068] Unless otherwise stated herein, the affinity of a TMMP of the present disclosure for a cognate co-immunomodulatory polypeptide, or the affinity of a control TMMP (where a control TMMP comprises a wild-type immunomodulatory polypeptide) for a cognate co-immunomodulatory polypeptide, is determined using BLI, as described above.

[0069] In some cases, the ratio of: i) the binding affinity of a control TMMP (where the control comprises a wild-type immunomodulatory polypeptide) to a cognate co-immunomodulatory polypeptide to ii) the binding affinity of a TMMP of the present disclosure comprising a variant of the wild-type immunomodulatory polypeptide to the cognate co-immunomodulatory polypeptide, when measured by BLI (as described above), is at least 1.5:1, at least 2:1, at least 5:1, at least 10:1, at least 15:1, at least 20:1, at least 25:1, at least 50:1, at least 100:1, at least 500:1, at least 10²:1, at least 5×10²:1, at least 10³:1, at least 5×10³:1, at least 10⁴:1, at least 10⁵:1, or at least 10⁶:1. In some cases, the ratio of: i) the binding affinity of a control TMMP (where the control comprises a wild-type immunomodulatory polypeptide) to a cognate co-immunomodulatory polypeptide to ii) the binding affinity of a TMMP of the present disclosure comprising a variant of the wild-type immunomodulatory polypeptide to the cognate co-immunomodulatory polypeptide, when measured by BLI, is in a range of from 1.5:1 to 10⁶:1, e.g., from 1.5:1 to 10:1, from 10:1 to 50:1, from 50:1 to 10²:1, from 10²:1 to 10³:1, from 10³:1 to 10⁴:1, from 10⁴:1 to 10⁵:1, or from 10⁵:1 to 10⁶:1.

[0070] As an example, where a control TMMP comprises a wild-type IL-2 polypeptide, and where a TMMP of the present disclosure comprises a variant IL-2 polypeptide (comprising from 1 to 10 amino acid substitutions relative to the amino acid sequence of the wild-type IL-2 polypeptide) as the immunomodulatory polypeptide, the ratio of: i) the binding affinity of the control TMMP to an IL-2 receptor (i.e., the cognate co-immunomodulatory polypeptide) to ii) the binding affinity of the TMMP of the present disclosure to the IL-2 receptor, when measured by BLI, is at least 1.5:1, at least 2:1, at least 5:1, at least 10:1, at least 15:1, at least 20:1, at least 25:1, at least 50:1, at least 100:1, at least 500:1, at least 10²:1, at least 5×10²:1, at least 10³:1, at least 5×10³:1, at least 10⁴:1, at least 10⁵:1, or at least 10⁶:1. In some cases, where a control TMMP comprises a wild-type IL-2 polypeptide, and where a TMMP of the present disclosure comprises a variant IL-2 polypeptide (comprising from 1 to 10 amino acid substitutions relative to the amino acid sequence of the wild-type IL-2 polypeptide) as the immunomodulatory polypeptide, the ratio of: i) the binding affinity of the control TMMP to an IL-2 receptor (i.e., the cognate co-immunomodulatory polypeptide) to ii) the binding affinity of the TMMP of the present disclosure to the IL-2 receptor, when measured by BLI, is in a range of from 1.5:1 to 10⁶:1, e.g., from 1.5:1 to 10:1, from 10:1 to 50:1, from 50:1 to 10²:1, from 10²:1 to 10³:1, from 10³:1 to 10⁴:1, from 10⁴:1 to 10⁵:1, or from 10⁵:1 to 10⁶:1.

[0071] As another example, where a control TMMP comprises a wild-type PD-L1 polypeptide, and where a TMMP of the present disclosure comprises a variant PD-L1 polypeptide (comprising from 1 to 10 amino acid substitutions relative to the amino acid sequence of the wild-type PD-L1 polypeptide) as the immunomodulatory polypeptide, the ratio of: i) the binding affinity of the control TMMP to a PD-1 polypeptide (i.e., the cognate co-immunomodulatory polypeptide) to ii) the binding affinity of the TMMP of the present disclosure to the PD-1 polypeptide, when measured by BLI, is at least 1.5:1, at least 2:1, at least 5:1, at least 10:1, at least 15:1, at least 20:1, at least 25:1, at least 50:1, at least 100:1, at least 500:1, at least 10²:1, at least 5×10²:1, at least 10³:1, at least 5×10³:1, at least 10⁴:1, at least 10⁵:1, or at least 10⁶:11.

[0072] As another example, where a control TMMP comprises a wild-type CD80 polypeptide, and where a TMMP of the present disclosure comprises a variant CD80 polypeptide (comprising from 1 to 10 amino acid substitutions relative to the amino acid sequence of the wild-type CD80 polypeptide) as the immunomodulatory polypeptide, the ratio of: i) the binding affinity of the control TMMP to a CTLA4 polypeptide (i.e., the cognate co-immunomodulatory polypeptide) to ii) the binding affinity of the TMMP of the present disclosure to the CTLA4 polypeptide, when measured by BLI, is at least 1.5:1, at least 2:1, at least 5:1, at least 10:1, at least 15:1, at least 20:1, at least 25:1, at least 50:1, at least 100:1, at least 500:1, at least 10²:1, at least 5×10²:1, at least 10³:1, at least 5×10³:1, at least 10⁴:1, at least 10⁵:1, or at least 10⁶:1.

[0073] As another example, where a control TMMP comprises a wild-type CD80 polypeptide, and where a TMMP of the present disclosure comprises a variant CD80 polypeptide (comprising from 1 to 10 amino acid substitutions relative to the amino acid sequence of the wild-type CD80 polypeptide) as the immunomodulatory polypeptide, the ratio of: i) the binding affinity of the control TMMP to a CD28 polypeptide (i.e., the cognate co-immunomodulatory polypeptide) to ii) the binding affinity of the TMMP of the present disclosure to the CD28 polypeptide, when measured by BLI, is at least 1.5:1, at least 2:1, at least 5:1, at least 10:1, at least 15:1, at least 20:1, at least 25:1, at least 50:1, at least 100:1, at least 500:1, at least 10²:1, at least 5×10²:1, at least 10³:1, at least 5×10³:1, at least 10⁴:1, at least 10⁵:1, or at least 10⁶:1.

[0074] As another example, where a control TMMP comprises a wild-type 4-1BBL polypeptide, and where a TMMP of the present disclosure comprises a variant 4-1BBL polypeptide (comprising from 1 to 10 amino acid substitutions relative to the amino acid sequence of the wild-type 4-1BBL polypeptide) as the immunomodulatory polypeptide, the ratio of: i) the binding affinity of the control TMMP to a 4-1BB polypeptide (i.e., the cognate co-immunomodulatory polypeptide) to ii) the binding affinity of the TMMP of the present disclosure to the 4-1BB polypeptide, when measured by BLI, is at least 1.5:1, at least 2:1, at least at least 10:1, at least 15:1, at least 20:1, at least 25:1, at least 50:1, at least 100:1, at least 500:1, at least 10²:1, at least 5×10²:1, at least 10³:1, at least 5×10³:1, at least 10⁴:1, at least 10⁵:1, or at least 10⁶:1.

[0075] As another example, where a control TMMP comprises a wild-type CD86 polypeptide, and where a TMMP of the present disclosure comprises a variant CD86 polypeptide (comprising from 1 to 10 amino acid substitutions relative to the amino acid sequence of the wild-type CD86 polypeptide) as the immunomodulatory polypeptide, the ratio of: i) the binding affinity of the control TMMP to a CD28 polypeptide (i.e., the cognate co-immunomodulatory polypeptide) to ii) the binding affinity of the TMMP of the present disclosure to the CD28 polypeptide, when measured by BLI, is at least 1.5:1, at least 2:1, at least 5:1, at least 10:1, at least 15:1, at least 20:1, at least 25:1, at least 50:1, at least 100:1, at least 500:1, at least 10²:1, at least 5×10²:1, at least 10³:1, at least 5×10³:1, at least 10⁴:1, at least 10⁵:1, or at least 10⁶:1.

[0076] Binding affinity of a TMMP of the present disclosure to a target T cell can be measured in the following manner: A) contacting a TMMP of the present disclosure with a target T-cell expressing on its surface: i) a cognate co-immunomodulatory polypeptide that binds the parental wild-type immunomodulatory polypeptide; and ii) a T-cell receptor that binds to the epitope, where the TMMP comprises an epitope tag, such that the TMMP binds to the target T-cell; B) contacting the target T-cell-bound TMMP with a fluorescently labeled binding agent (e.g., a fluorescently labeled antibody) that binds to the epitope tag, generating a TMMP/target T-cell/binding agent complex; C) measuring the mean fluorescence intensity (MFI) of the TMMP/target T-cell/binding agent complex using flow cytometry. The epitope tag can be, e.g., a FLAG tag, a hemagglutinin tag, a c-myc tag, a poly(histidine) tag, etc. The MFI measured over a range of concentrations of the TMMP library member provides a measure of the affinity. The MFI measured over a range of concentrations of the TMMP library member provides a half maximal effective concentration (EC₅₀) of the TMMP. In some cases, the EC₅₀ of a TMMP of the present disclosure for a target T cell is in the nM range; and the EC₅₀ of the TMMP for a control T cell (where a control T cell expresses on its surface: i) a cognate co-immunomodulatory polypeptide that binds the parental wild-type immunomodulatory polypeptide; and ii) a T-cell receptor that does not bind to the epitope present in the TMMP) is in the μM range. In some cases, the ratio of the EC₅₀ of a TMMP of the present disclosure for a control T cell to the EC₅₀ of the TMMP for a target T cell is at least 1.5:1, at least 2:1, at least 5:1, at least 10:1, at least 1.5:1, at least 20:1, at least 25:1, at least 50:1, at least 100:1, at least 500:1, at least 10²:1, at least 5×10²:1, at least 10³:1, at least 5×10³:1, at least 10⁴:1, at lease 10⁵: 1, or at least 10⁶:1. The ratio of the EC₅₀ of a TMMP of the present disclosure for a control T cell to the EC₅₀ of the TMMP for a target T cell is an expression of the selectivity of the TMMP.

[0077] In some cases, when measured as described in the preceding paragraph, a TMMP of the present disclosure exhibits selective binding to target T-cell, compared to binding of the TMMP library member to a control T cell that comprises: i) the cognate co-immunomodulatory polypeptide that binds the parental wild-type immunomodulatory polypeptide; and ii) a T-cell receptor that binds to an epitope other than the epitope present in the TMMP library member.

### Dimerized TMMPs

[0078] A TMMP of the present disclosure can be dimerized; i.e., the present disclosure provides a multimeric polypeptide comprising a dimer of a TMMP of the present disclosure. Thus, the present disclosure provides a TMMP comprising: A) a first heterodimer comprising: a) a first polypeptide comprising: i) a peptide epitope; and ii) a first major histocompatibility complex (MHC) polypeptide; and b) a second polypeptide comprising: i) a second MHC polypeptide, wherein the first heterodimer comprises one or more immunomodulatory polypeptides; and B) a second heterodimer comprising: a) a first polypeptide comprising: i) a peptide epitope; and ii) a first MHC polypeptide; and b) a second polypeptide comprising: i) a second MHC polypeptide, wherein the second heterodimer comprises one or more immunomodulatory polypeptides, and wherein the first heterodimer and the second heterodimer are covalently linked to one another. In some cases, the two TMMPs are identical to one another in amino acid sequence. In some cases, the first heterodimer and the second heterodimer are covalently linked to one another via a C-terminal region of the second polypeptide of the first heterodimer and a C-terminal region of the second polypeptide of the second heterodimer. In some cases, first heterodimer and the second heterodimer are covalently linked to one another via the C-terminal amino acid of the second polypeptide of the first heterodimer and the C-terminal region of the second polypeptide of the second heterodimer; for example, in some cases, the C-terminal amino acid of the second polypeptide of the first heterodimer and the C-terminal region of the second polypeptide of the second heterodimer are linked to one another, either directly or via a linker. The linker can be a peptide linker. The peptide linker can have a length of from 1 amino acid to 200 amino acids (e.g., from 1 amino acid (aa) to 5 aa, from 5 aa to 10 aa, from 10 aa to 25 aa, from 25 aa to 50 aa, from 50 aa to 100 aa, from 100 aa to 150 aa, or from 150 aa to 200 aa). In some cases, the peptide epitope of the first heterodimer and the peptide epitope of the second heterodimer comprise the same amino acid sequence. In some cases, the first MHC polypeptide of the first and the second heterodimer is an MHC Class I β2-microglobulin, and wherein the second MHC polypeptide of the first and the second heterodimer is an MHC Class I heavy chain. In some cases, the immunomodulatory polypeptide of the first heterodimer and the immunomodulatory polypeptide of the second heterodimer comprise the same amino acid sequence. In some cases, the immunomodulatory polypeptide of the first heterodimer and the immunomodulatory polypeptide of the second heterodimer are variant immunomodulatory polypeptides that comprise from 1 to 10 amino acid substitutions compared to a corresponding parental wild-type immunomodulatory polypeptide, and wherein the from 1 to 10 amino acid substitutions result in reduced affinity binding of the variant immunomodulatory polypeptide to a cognate co-immunomodulatory polypeptide. In some cases, the immunomodulatory polypeptide of the first heterodimer and the immunomodulatory polypeptide of the second heterodimer are each independently selected from the group consisting of IL-2, 4-1BBL, PD-L1, CD80, CD86, ICOS-L, OX-40L, FasL, JAG1 (CD339), TGFβ, CD70, and ICAM. Examples, of suitable MHC polypeptides, immunomodulatory polypeptides, and peptide epitopes are described below.

### MHC Polypeptides

[0079] As noted above, a TMMP of the present disclosure includes MHC polypeptides. For the purposes of the instant disclosure, the term “major histocompatibility complex (MHC) polypeptides” is meant to include MHC polypeptides of various species, including human MHC (also referred to as human leukocyte antigen (HLA)) polypeptides, rodent (e.g., mouse, rat, etc.) MHC polypeptides, and MHC polypeptides of other mammalian species (e.g., lagomorphs, non-human primates, canines, felines, ungulates (e.g., equines, bovines, ovines, caprins, etc.), and the like. The term “MHC polypeptide” is meant to include Class I MHC polypeptides (e.g., β-2 microglobulin and MHC class I heavy chain).

[0080] In some cases, the first MHC polypeptide is an MHC Class I β2M (β2M) polypeptide, and the second MHC polypeptide is an MHC Class I heavy chain (H chain) (“MHC-H”)). In other instances, the first MHC polypeptide is an MHC Class I heavy chain polypeptide; and the second MHC polypeptide is a β2M polypeptide. In some cases, both the β2M and MHC-H chain are of human origin; i.e., the MHC-H chain is an HLA heavy chain, or a variant thereof. Unless expressly stated otherwise, a TMMP of the present disclosure does not include membrane anchoring domains (transmembrane regions) of an MHC Class I heavy chain, or a part of MHC Class I heavy chain sufficient to anchor the resulting TMMP to a cell (e.g., eukaryotic cell such as a mammalian cell) in which it is expressed. In some cases, the MHC Class I heavy chain present in a TMMP of the present disclosure does not include a signal peptide, a transmembrane domain, or an intracellular domain (cytoplasmic tail) associated with a native MHC Class I heavy chain. Thus, e.g., in some cases, the MHC Class I heavy chain present in a TMMP of the present disclosure includes only the α1, α2, and α3 domains of an MHC Class I heavy chain. In some cases, the MHC Class I heavy chain present in a TMMP of the present disclosure has a length of from about 270 amino acids (aa) to about 290 aa. In some cases, the MHC Class I heavy chain present in a TMMP of the present disclosure has a length of 270 aa, 271 aa, 272 aa, 273 aa, 274 aa, 275 aa, 276 aa, 277 aa, 278 aa, 279 aa, 280 aa, 281 aa, 282 aa, 283 aa, 284 aa, 285 aa, 286 aa, 287 aa, 288 aa, 289 aa, or 290 aa.

[0081] In some cases, an MHC polypeptide of a TMMP is a human MHC polypeptide, where human MHC polypeptides are also referred to as “human leukocyte antigen” (“HLA”) polypeptides. In some cases, an MHC polypeptide of a TMMP is a Class I HLA polypeptide, e.g., a β2-microglobulin polypeptide, or a Class I HLA heavy chain polypeptide. Class I HLA heavy chain polypeptides include HLA-A heavy chain polypeptides, HLA-B heavy chain polypeptides, HLA-C heavy chain polypeptides, HLA-E heavy chain polypeptides, HLA-F heavy chain polypeptides, and HLA-G heavy chain polypeptides.

### MHC Class I Heavy Chains

[0082] In some cases, an MHC Class I heavy chain polypeptide present in a TMMP of the present disclosure comprises an amino acid sequence having at least 75%, at least 80%, at least 85%, at least 90%, at least 95%, at least 98%, at least 99%, or 100%, amino acid sequence identity to all or part (e.g., 50, 75, 100, 150, 200, or 250 contiguous amino acids) of the amino acid sequence of any of the human HLA heavy chain polypeptides depicted in FIGS. 9-15. In some cases, the MHC Class I heavy chain has a length of 270 aa, 271 aa, 272 aa, 273 aa, 274 aa, 275 aa, 276 aa, 277 aa, 278 aa, 279 aa, 280 aa, 281 aa, 282 aa, 283 aa, 284 aa, 285 aa, 286 aa, 287 aa, 288 aa, 289 aa, or 290 aa. In some cases, an MHC Class I heavy chain polypeptide present in a TMMP of the present disclosure comprises 1-30, 1-5, 5-10, 10-15, 15-20, 20-25 or 25-30 amino acid insertions, deletions, and/or substitutions (in addition to those locations indicated as being variable in the heavy chain consensus sequences) of any one of the amino acid sequences depicted in FIGS. 9-15. In some cases, the MHC Class I heavy chain does not include transmembrane or cytoplasmic domains. As an example, a MHC Class I heavy chain polypeptide of a TMMP of the present disclosure can comprise an amino acid sequence having at least 75%, at least 80%, at least 85%, at least 90%, at least 95%, at least 98%, at least 99%, or 100%, amino acid sequence identity to amino acids 25-300 (lacking all, or substantially all, of the leader, transmembrane and cytoplasmic sequence) or amino acids 25-365 (lacking the leader) of a human HLA-A heavy chain polypeptides depicted in any one of FIGS. 9A, 9B, and 9C.

[0083] FIGS. 9A, 9B and 9C provide amino acid sequences of human leukocyte antigen (HLA) Class I heavy chain polypeptides. Signal sequences, amino acids 1-24, are bolded and underlined. FIG. 9A entry: 3A.1 is the HLA-A alpha chain (HLA-A*01:01:01:01 or A*0101) (NCBI accession NP_001229687.1), SEQ ID NO:23; entry 3A.2 is from HLA-A*1101 SEQ ID NO:24; entry 3A.3 is from HLA-A*2402 SEQ ID NO:25 and entry 3A.4 is from HLA-A*3303 SEQ ID NO:26. FIG. 9B provides the sequence HLA-B*07:02:01 (HLA-B*0702) NCBI GenBank Accession NP_005505.2 (see also GenBank Accession AUV50118.1). FIG. 9C provides the sequence HLA-C*0701 (GenBank Accession NP_001229971.1) (HLA-C*07:01:01:01 or HLA-Cw*070101, HLA-Cw*07 see GenBank Accession CAO78194.1).

[0084] FIG. 10 provides an alignment of eleven mature MHC class I heavy chain amino acid sequences without their leader sequences or transmembrane domains or intracellular domains. The aligned sequences are human HLA-A, HLA-B, and HLA-C, a mouse H2K protein sequence, three variants of HLA-A (var. 1, var. 2C, and var.2CP), and 3 human HLA-A variants (HLA-A*1101; HLA-A*2402; and HLA-A*3303). Indicated in the alignment are the locations (84 and 139 of the mature proteins) where cysteine residues may be introduced (e.g., by substitution) for the formation of a disulfide bond to stabilize the MHC H chain-β2M complex. Also shown in the alignment is position 236 (of the mature polypeptide), which may be substituted by a cysteine residue that can form an inter-chain disulfide bond with β2M (e.g., at aa 12). An arrow appears above each of those locations and the residues are bolded. The seventh HLA-A sequence shown in the alignment (var. 2c), shows the sequence of variant 2 substituted with C residues at positions 84, 139 and 236. The boxes flanking residues 84, 139 and 236 show the groups of five amino acids on either sides of those six sets of five residues, denoted aac1 (for “amino acid cluster 1”), aac2 (for “amino acid cluster 2”), aac3 (for “amino acid cluster 3”), aac4 (for “amino acid cluster 4”), aac5 (for “amino acid cluster 5”), and aac6 (for “amino acid cluster 6”), that may be replaced by 1 to 5 amino acids selected independently from (i) any naturally occurring amino acid or (ii) any naturally occurring amino acid except proline or glycine.

[0085] With regard to FIG. 10, in some cases: i) aac1 (amino acid cluster 1) may be the amino acid sequence GTLRG (SEQ ID NO:287) or that sequence with one or two amino acids deleted or substituted with other naturally occurring amino acids (e.g., L replaced by I, V, A or F); ii) aac2 (amino acid cluster 2) may be the amino acid sequence YNQSE (SEQ ID NO:288) or that sequence with one or two amino acids deleted or substituted with other naturally occurring amino acids (e.g., N replaced by Q, Q replaced by N, and/or E replaced by D); iii) aac3 (amino acid cluster 3) may be the amino acid sequence TAADM (SEQ ID NO:289) or that sequence with one or two amino acids deleted or substituted with other naturally occurring amino acids (e.g., T replaced by S, A replaced by G, D replaced by E, and/or M replaced by L, V, or I); iv) aac4 (amino acid cluster 4) may be the amino acid sequence AQTTK (SEQ ID NO:290) or that sequence with one or two amino acids deleted or substituted with other naturally occurring amino acids (e.g., A replaced by G, Q replaced by N, or T replaced by S, and/or K replaced by R or Q); v) aac5 (amino acid cluster 5) may be the amino acid sequence VETRP (SEQ ID NO:291) or that sequence with one or two amino acids deleted or substituted with other naturally occurring amino acids (e.g., V replaced by I or L, E replaced by D, T replaced by S, and/or R replaced by K); and/or vi) aac6 (amino acid cluster 6) may be the amino acid sequence GDGTF (SEQ ID NO:292) or that sequence with one or two amino acids deleted or substituted with other naturally occurring amino acids (e.g., D replaced by E, T replaced by S, or F replaced by L, W, or Y).

[0086] FIGS. 11-13 provide alignments of mature HLA class I heavy chain amino acid sequences (without leader sequences or transmembrane domains or intracellular domains). The aligned amino acid sequences in FIG. 11A are HLA-A class I heavy chains of the following alleles: A*0101, A*0201, A*0301, A*1101, A*2301, A*2402, A*2407, A*3303, and A*3401. The aligned amino acid sequences in FIG. 12A are HLA-B class I heavy chains of the following alleles: B*0702, B*0801, B*1502, B*3802, B*4001, B*4601, and B*5301. The aligned amino acid sequences in FIG. 13A are HLA-C class I heavy chains of the following alleles: C*0102, C*0303, C*0304, C*0401, C*0602, C*0701, C*0801, and C*1502. Indicated in the alignments are the locations (84 and 139 of the mature proteins) where cysteine residues may be introduced (e.g., by substitution) for the formation of a disulfide bond to stabilize the HLA H chain-β2M complex. Also shown in the alignment is position 236 (of the mature polypeptide), which may be substituted by a cysteine residue that can form an inter-chain disulfide bond with β2M (e.g., at aa 12). The boxes flanking residues 84, 139 and 236 show the groups of five amino acids on either sides of those six sets of five residues, denoted aac1 (for “amino acid cluster 1”), aac2 (for “amino acid cluster 2”), aac3 (for “amino acid cluster 3”), aac4 (for “amino acid cluster 4”), aac5 (for “amino acid cluster 5”), and aac6 (for “amino acid cluster 6”), that may be replaced by 1 to 5 amino acids selected independently from (i) any naturally occurring amino acid or (ii) any naturally occurring amino acid except proline or glycine.

[0087] FIGS. 11A, 12A, and 13A provide alignments of the amino acid sequences of mature HLA-A, -B, and -C class I heavy chains, respectively. The sequences are provided for the extracellular portion of the mature protein (without leader sequences or transmembrane domains or intracellular domains). As described in FIG. 10, the positions of aa residues 84, 139, and 236 and their flanking residues (aac1 to aac6) that may be replaced by 1 to 5 amino acids selected independently from (i) any naturally occurring amino acid or (ii) any naturally occurring amino acid except proline or glycine ae also shown. FIGS. 11B, 12B, and 13C provide consensus amino acid sequences for the HLA-A, -B, and -C sequences, respectively, provide in FIGS. 11A, 12A, and 13A. The consensus sequences show the variable amino acid positions as “X” residues sequentially numbered and the locations of amino acids 84, 139 and 236 double underlined.

[0088] With regard to FIG. 11A, in some cases: i) aac1 (amino acid cluster 1) may be the amino acid sequence GTLRG (SEQ ID NO:287) or that sequence with one or two amino acids deleted or substituted with other naturally occurring amino acids (e.g., L replaced by I, V, A or F); ii) aac2 (amino acid cluster 2) may be the amino acid sequence YNQSE (SEQ ID NO:288) or that sequence with one or two amino acids deleted or substituted with other naturally occurring amino acids (e.g., N replaced by Q, Q replaced by N, and/or E replaced by D); iii) aac3 (amino acid cluster 3) may be the amino acid sequence TAADM (SEQ ID NO:289) or that sequence with one or two amino acids deleted or substituted with other naturally occurring amino acids (e.g., T replaced by S, A replaced by G, replaced by E, and/or M replaced by L, V, or I); iv) aac4 (amino acid cluster 4) may be the amino acid sequence AQTTK (SEQ ID NO:290) or that sequence with one or two amino acids deleted or substituted with other naturally occurring amino acids (e.g., A replaced by G, Q replaced by N, or T replaced by S, and or K replaced by R or Q); v) aac5 (amino acid cluster 5) may be the amino acid sequence VETRP (SEQ ID NO:291) or that sequence with one or two amino acids deleted or substituted with other naturally occurring amino acids (e.g., V replaced by I or L, E replaced by D, T replaced by S, and/or R replaced by K); and/or vi) aac6 (amino acid cluster 6) may be the amino acid sequence GDGTF (SEQ ID NO:292) or that sequence with one or two amino acids deleted or substituted with other naturally occurring amino acids (e.g., D replaced by E, T replaced by S, or F replaced by L, W, or Y).

[0089] With regard to FIG. 12A, in some cases: i) aac1 (amino acid cluster 1) may be the amino acid sequence RNLRG (SEQ ID NO:293) or that sequence with one or two amino acids deleted or substituted with other naturally occurring amino acids (e.g., N replaced by T or I; and/or L replaced by A; and/or the second R replaced by L; and/or the G replaced by R); ii) aac2 (amino acid cluster 2) may be the amino acid sequence YNQSE (SEQ ID NO:288) or that sequence with one or two amino acids deleted or substituted with other naturally occurring amino acids (e.g., N replaced by Q, Q replaced by N, and/or E replaced by D); iii) aac3 (amino acid cluster 3) may be the amino acid sequence TAADT (SEQ ID NO:294) or that sequence with one or two amino acids deleted or substituted with other naturally occurring amino acids (e.g., the first T replaced by S; and/or A replaced by G; and/or D replaced by E; and/or the second T replaced by S); iv) aac4 (amino acid cluster 4) may be the amino acid sequence AQITQ (SEQ ID NO:295) or that sequence with one or two amino acids deleted or substituted with other naturally occurring amino acids (e.g., A replaced by G; and/or the first Q replaced by N; and/or I replaced by L or V; and/or the T replaced by S; and/or the second Q replaced by N); v) aac5 (amino acid cluster 5) may be the amino acid sequence VETRP (SEQ ID NO:291) or that sequence with one or two amino acids deleted or substituted with other naturally occurring amino acids (e.g., V replaced by T or L, E replaced by D, T replaced by S, and/or R replaced by K); and/or vi) aac6 (amino acid cluster 6) may be the amino acid sequence GDRTF (SEQ ID NO:296) or that sequence with one or two amino acids deleted or substituted with other naturally occurring amino acids (e.g., D replaced by E; and/or T replaced by S; and/or R replaced by K or H; and/or F replaced by L, W, or Y).

[0090] With regard to FIG. 13A, in some cases: i) aac1 (amino acid cluster 1) may be the amino acid sequence RNLRG (SEQ ID NO:293) or that sequence with one or two amino acids deleted or substituted with other naturally occurring amino acids (e.g., N replaced by K; and/or L replaced by A or I; and/or the second R replaced by H; and/or the G replaced by T or S); ii) aac2 (amino acid cluster 2) may be the amino acid sequence YNQSE (SEQ ID NO:288) or that sequence with one or two amino acids deleted or substituted with other naturally occurring amino acids (e.g., N replaced by Q, Q replaced by N, and/or E replaced by D); iii) aac3 (amino acid cluster 3) may be the amino acid sequence TAADT (SEQ ID NO:294) or that sequence with one or two amino acids deleted or substituted with other naturally occurring amino acids (e.g., the first T replaced by S; and/or A replaced by G; and/or D replaced by E; and/or the second T replaced by S); iv) aac4 (amino acid cluster 4) may be the amino acid sequence AQITQ (SEQ ID NO:295) or that sequence with one or two amino acids deleted or substituted with other naturally occurring amino acids (e.g., A replaced by G; and/or the first Q replaced by N; and/or I replaced by L; and/or the second Q replaced by N or K); v) aac5 (amino acid cluster 5) may be the amino acid sequence VETRP (SEQ ID NO:291) or that sequence with one or two amino acids deleted or substituted with other naturally occurring amino acids (e.g., V replaced by I or L, E replaced by D, T replaced by S, and/or R replaced by K or H); and/or vi) aac6 (amino acid cluster 6) may be the amino acid sequence GDGTF (SEQ ID NO:292) or that sequence with one or two amino acids deleted or substituted with other naturally occurring amino acids (e.g., D replaced by E; and/or T replaced by S; and/or F replaced by L, W, or Y).

### HLA-A

[0091] In some cases, a TMMP of the present disclosure comprises an HLA-A heavy chain polypeptide. The HLA-A heavy chain peptide sequences, or portions thereof, that may be that may be incorporated into a TMMP of the present disclosure include, but are not limited to, the alleles: A*0101, A*0201, A*0301, A*1101, A*2301, A*2402, A*2407, A*3303, and A*3401, which are aligned without all, or substantially all, of the leader, transmembrane and cytoplasmic sequences in FIG. 11A. Any of those alleles may comprise a mutation at one or more of positions 84, 139 and/or 236 (as shown in FIG. 11A) selected from: a tyrosine to alanine at position 84 (Y84A); a tyrosine to cysteine at position 84 (Y84C); an alanine to cysteine at position 139 (A139C); and an alanine to cysteine substitution at position 236 (A236C). In addition, HLA-A sequence having at least 75% (e.g., at least 80%, at least 85%, at least 90%, at least 95%, at least 98%, at least 99%) or 100% amino acid sequence identity to all or part (e.g., 50, 75, 100, 150, 200, or 250 contiguous amino acids) of the sequence of those HLA-A alleles may also be employed (e.g., it may comprise 1-25, 1-5, 5-10, 10-15, 15-20, 20-25, or 25-30 amino acid insertions, deletions, and/or substitutions).

[0092] In some cases, a TMMP of the present disclosure comprises an HLA-A heavy chain polypeptide comprising the following HLA-A consensus amino acid sequence:

[0093] GSHSMRYFX1TSVSRPGRGEPRFIAVGYVDDTQFVRFDSDAASQX2MEPRAPWIE QEGPEYWDX3X4TX5X6X7KAX8SQX9X10RX11X12LX13X14X15X16X17YYNQSEX18GSHTX19QX20MX21GCDVGX22DX23RFLRGYX24QX25AYDGKDYIALX26EDLRSWTAADMAAQX27T X287X29KWEX30X31X32EAEQX33RX34YLX35GX36CVX37X38LRRYLENGKETLQRTDX39PK THMTHHX40X41SDHEATLRCWALX42FYPAEITLTWQRDGEDQTQDTELVETRPAGDGTFQK WAX43VVVPSGX44EQRYTCHVQHEGLPKPLTLRWEX45 (SEQ ID NO:29), wherein X1 is F, Y, S, or T; X2 is K or R; X3 is Q, G, E, R; X4 is N or E; X5 is R or G; X6 is N or K; X7 is M or V; X8 is H or Q; X9 is T or I; X10 is D or H; X11 is A, V, or E; X12 is N or D; X13 is G or R; X14 is T or I; X15 is L or A; X16 is R or L; X17 is G or R; X18 is A or D; X19 is I, L, or V; X20 is I, R or M; X21 is F or Y; X22 is S or P; X23 is W or G; X24 is R, H, or Q; X25 is D or Y; X26 is N or K; X27 is T or I; X28 is K or Q; X29 is R or H; X30 is A or T; X31 is A or V; X32 is H or R; X33 is R, L, Q, or W; X34 is V or A; X35 is D or E; X36 is R or T; X37 is D or E; X38 is W or G; X39 is P or A; X40 is P or A; X41 is V or I; X42 is S or G; X43 is A or S; X44 is Q or E; and X45 is P or L.

[0094] As one example, an MHC Class I heavy chain polypeptide of a TMMP can comprise an amino acid sequence having at least 75%, at least 80%, at least 85%, at least 90%, at least 95%, at least 98%, at least 99%, or 100%, amino acid sequence identity to the following human HLA-A heavy chain amino acid sequence:

(SEQ ID NO: 297)
[sequence omitted]

[0095] In some cases, an HLA-A heavy chain polypeptide suitable for inclusion in a TMMP of the present disclosure comprises the following amino acid sequence:

(SEQ ID NO: 297)
[sequence omitted]

This HLA-A heavy chain polypeptide is also referred to as “HLA-A*0201” or simply “HLA-A02.” In some cases, the C-terminal Pro is not included in a TMMP of the present disclosure. For example, in some cases, an HLA-A02 polypeptide suitable for inclusion in a TMMP of the present disclosure comprises the following amino acid sequence:

(SEQ ID NO:555)
[sequence omitted]

### HLA-A (Y84A; A236C)

[0096] In some cases, the MHC Class I heavy chain polypeptide comprises Y84A and A236C substitutions. For example, in some cases, the MHC Class I heavy chain polypeptide comprises an amino acid sequence having at least 75%, at least 80%, at least 85%, at least 90%, at least 95%, at least 98%, at least 99%, or 100%, amino acid sequence identity to the following human HLA-A heavy chain (Y84A; A236C) amino acid sequence:

(SEQ ID NO: 298)
GSHSMRYFFTSVSRPGRGEPRFIAVGYVDDTQFVRFDSDAASQRMEPRAP
WIEQEGPEYWDGETRKVKAHSQTHRVDLGTLRGAYNQSEAGSHTVQRMYG
CDVGSDWRFLRGYHQYAYDGKDYIALKEDLRSWTAADMAAQTTKHKWEAA
HVAEQLRAYLEGTCVEWLRRYLENGKETLQRTDAPKTHMTHHAVSDHEAT
LRCWALSFYPAEITLTWQRDGEDQTQDTELVETRPCGDGTFQKWAAVVVP
SGQEQRYTCHVQHEGLPKPLTLRWEP,

where amino acid 84 is Ala and amino acid 236 is Cys. In some cases, the Cys-236 forms an interchain disulfide bond with Cys-12 of a variant β2M polypeptide that comprises an R12C substitution.

[0097] In some cases, an HLA-A heavy chain polypeptide suitable for inclusion in a TMMP of the present disclosure is an HLA-A02 (Y84A; A236C) polypeptide comprising the following amino acid sequence:

(SEQ ID NO: 298)
GSHSMRYFFTSVSRPGRGEPRFIAVGYVDDTQFVRFDSDAASQRMEPRAP
WIEQEGPEYWDGETRKVKAHSQTHRVDLGTLRGAYNQSEAGSHTVQRMYG
CDVGSDWRFLRGYHQYAYDGKDYIALKEDLRSWTAADMAAQTTKHKWEAA
HVAEQLRAYLEGTCVEWLRRYLENGKETLQRTDAPKTHMTHHAVSDHEAT
LRCWALSFYPAEITLTWQRDGEDQTQDTELVETRPCGDGTFQKWAAVVVP
SGQEQRYTCHVQHEGLPKPLTLRWEP.

[0098] In some cases, an HLA-A heavy chain polypeptide suitable for inclusion in a TMMP of the present disclosure is an HLA-A02 (Y84A; A236C) polypeptide comprising the following amino acid sequence:

(SEQ ID NO: 556)
CSHSMRYFFTSVSKPGRGEPRFIAVGYVDDTQFVRFDSDAASQRMEPRAP
WIEQEGPEYWDGETRKVKAHSQTHRVDLGTLRGAYNQSEAGSHTVQRMYG
CDVGSDWRFLRGYHQYAYDGKDYIALKEDLRSWTAADMAAQTTKHKWEAA
HVAEQLRAYLEGTCVEWLRRYLENGKETLQRTDAPKTHMTHHAVSDHEAT
LRCWALSFYPAEITLTWQRDGEDQTQDTELVETRPCGDGTFQKWAAVVVP
SGQEQRYTCHVQHEGLPKPLTLRWE.

### HLA-A (Y84C; A139C)

[0099] In some cases, the MHC Class I heavy chain polypeptide comprises Y84C and A139C substitutions. For example, in some cases, the MHC Class I heavy chain polypeptide comprises an amino acid sequence having at least 75%, at least 80%, at least 85%, at least 90%, at least 95%, at least 98%, at least 99%, or 100%, amino acid sequence identity to the following human HLA-A heavy chain (Y84C; A139C) amino acid sequence:

(SEQ ID NO: 299)
GSHSMRYFFTSVSRPGRGEPRFIAVGYVDDTQFVRFDSDAASQRMEPRAP
WIEQEGPEYWDGETRKVKAHSQTHRVDLGTLRGCYNQSEAGSHTVQRMYG
CDVGSDWRFLRGYHQYAYDGKDYIALKEDLRSWTAADMCAQTTKHKWEAA
HVAEQLRAYLEGTCVEWLRRYLENGKETLQRTDAPKTHMTHHAVSDHEAT
LRCWALSFYPAEITLTWQRDGEDQTQDTELVETRPAGDGTFQKWAAVVVP
SGQEQRYTCHVQHEGLPKPLTLRWEP,

where amino acid 84 is Cys and amino acid 139 is Cys. In some cases, Cys-84 forms an intrachain disulfide bond with Cys-139.

### HLA-A11 (HLA-A*1101)

[0100] As one non-limiting example, an MHC Class I heavy chain polypeptide of a TMMP can comprise an amino acid sequence having at least 75%, at least 80%, at least 85%, at least 90%, at least 95%, at least 98%, at least 99%, or 100%, amino acid sequence identity to the following human HLA-A11 heavy chain amino acid sequence:

(SEQ ID NO: 300)
GSHSMRYFYTSVSRPGRGEPRFIAVGYVDDTQFVRFDSDAASQRMEPRAP
WIEQEGPEYWDQETRNVKAQSQTDRVDLGTLRGYYNQSEDGSHTIQIMYG
CDVGPDGRFLRGYRQDAYDGKDYIALNEDLRSWTAADMAAQITKRKWEAA
HAAEQQRAYLEGTCVEWLRRYLENGKETLQRTDPPKTHMTHHPISDHEAT
LRCWALGFYPAEITLTWQRDGEDQTQDTELVETRPAGDGTFQKWAAVVVP
SGEEQRYTCHVQHEGLPKPLTLRWE.

Such an MHC Class I heavy chain may be prominent in Asian populations, including populations of individuals of Asian descent.

### HLA-A11 (Y84A; A236C)

[0101] As one non-limiting example, in some cases, the MHC Class I heavy chain polypeptide is an HLA-A11 allele that comprises Y84A and A236C substitutions. For example, in some cases, the MHC Class I heavy chain polypeptide comprises an amino acid sequence having at least 75%, at least 80%, at least 85%, at least 90%, at least 95%, at least 98%, at least 99%, or 100%, amino acid sequence identity to the following human HLA-A A11 heavy chain (Y84A; A236C) amino acid sequence:

(SEQ ID NO: 301)
GSHSMRYFYTSVSRPGRGEPRFIAVGYVDDTQFVRFDSDAASQRMEPRAP
WIEQEGPEYWDQETRNVKAQSQTDRVDLGTLRGAYNQSEDGSHTIQIMYG
CDVGPDGRFLRGYRQDAYDGKDYIALNEDLRSWTAADMAAQITKRKWEAA
HAAEQQRAYLEGTCVEWLRRYLENGKETLQRTDPPKTHMTHHPISDHEAT
LRCWALGFYPAEITLTWQRDGEDQTQDTELVETRPCGDGTFQKWAAVVVP
SGEEQRYTCHVQHEGLYKPLTERWE,

where amino acid 84 is Ala and amino acid 236 is Cys. In some cases, the Cys-236 forms an interchain disulfide bond with Cys-12 of a variant β2M polypeptide that comprises an R12C substitution.

### HLA-A24 (HLA-A*2402)

[0102] As one non-limiting example, an MHC Class I heavy chain polypeptide of a TMMP of the present disclosure can comprise an amino acid sequence having at least 75%, at least 80%, at least 85%, at least 90%, at least 95%, at least 98%, at least 99%, or 100%, amino acid sequence identity to the following human HLA-A24 heavy chain amino acid sequence:

(SEQ ID NO: 302)
GSHSMRYFSTSVSRPGRGEPRFIAVGYVDDTQFVRFDSDAASQRMEPRAP
WIEQEGPEYWDEETGKVKAHSQTDRENLRIALRYYNQSEAGSHTLQMMFG
CDVGSDGRFLRGYHQYAYDGKDYIALKEDLRSWTAADMAAQITKRKWEAA
HVAEQQRAYLEGTCVDGLRRYLENGKETLQRTDPPKTHMTHHPISDHEAT
LRCWALGFYPAEITLTWQRDGEDQTQDTELVETRPAGDGTFQKWAAVVVP
SGEEQRYTCHVQHEGLPKPLTLRWEPSSQPTVPIVGIIAGLVLLGAVITG
AVVAAVMWRRNSSDRKGGSYSQAASSDSAQGSDVSLTACKV.

Such an MHC Class I heavy chain may be prominent in Asian populations, including populations of individuals of Asian descent. In some cases, amino acid 84 is an Ala. In some cases, amino acid 84 is a Cys. In some cases, amino acid 236 is a Cys. In some cases, amino acid 84 is an Ala and amino acid 236 is a Cys. In some cases, amino acid 84 is an Cys and amino acid 236 is a Cys.

### HLA-A33 (HLA-A*3303)

[0103] As one non-limiting example, an MHC Class I heavy chain polypeptide of a TMMP of the present disclosure can comprise an amino acid sequence having at least 75%, at least 80%, at least 85%, at least 90%, at least 95%, at least 98%, at least 99%, or 100%, amino acid sequence identity to the following human HLA-A33 heavy chain amino acid sequence:

(SEQ ID NO: 303)
GSHSMRYFTTSVSRPGRGEPRFIAVGYVDDTQFVRFDSDAASQRMEPRAP
WIEQEGPEYWDRNTRNVKAHSQIDRVDLGTLRGYYNQSEAGSHTIQMMYG
CDVGSDGRFLRGYQQDAYDGKDYIALNEDLRSWTAADMAAQITQRKWEAA
RVAEQLRAYLEGTCVEWLRRYLENGKETLQRTDPPKTHMTHHAVSDHEAT
LRCWALSFYPAEITLTWQRDGEDQTQDTELVETRPAGDGTFQKWASVVVP
SGQEQRYTCHVQHEGLPKPLTLRWEPSSQPTIPIVGIIAGLVLFGAVFAG
AVVAAVRWRRKSSDRKGGSYSQAASSDSAQGSDMSLTACKV.

Such an MHC Class I heavy chain may be prominent in Asian populations, including populations of individuals of Asian descent. In some cases, amino acid 84 is an Ala. In some cases, amino acid 84 is a Cys. In some cases, amino acid 236 is a Cys. In some cases, amino acid 84 is an Ala and amino acid 236 is a Cys. In some cases, amino acid 84 is an Cys and amino acid 236 is a Cys.

### HLA-B

[0104] In some cases, a TMMP of the present disclosure comprises an HLA-B heavy chain polypeptide. The HLA-B heavy chain peptide sequences, or portions thereof, that may be that may be incorporated into a TMMP of the present disclosure include, but are not limited to, the alleles: B*0702, B*0801, B*1502, B*3802, B*4001, B*4601, and B*5301, which are aligned without all, or substantially all, of the leader, transmembrane and cytoplasmic sequences in FIG. 12A. Any of those alleles may comprise a mutation at one or more of positions 84, 139 and/or 236 (as shown in FIG. 12A) selected from: a tyrosine to alanine at position 84 (Y84A); a tyrosine to cysteine at position 84 (Y84C); an alanine to cysteine at position 139 (A139C); and an alanine to cysteine substitution at position 236 (A236C). In addition, a HLA-B polypeptide comprising an amino acid sequence having at least 75% (e.g., at least 80%, at least 85%, at least 90%, at least 95%, at least 98%, at least 99%) or 100% amino acid sequence identity to all or part (e.g., 50, 75, 100, 150, 200, or 250 contiguous amino acids) of the sequence of those HLA-B alleles may also be employed (e.g., it may comprise 1-25, 1-5, 5-10, 10-15, 15-20, 20-25, or 25-30 amino acid insertions, deletions, and/or substitutions).

[0105] In some cases, a TMMP of the present disclosure comprises an HLA-B heavy chain polypeptide comprising the following HLA-B consensus amino acid sequence:

(SEQ ID NO:30)
GSHSMRYFX1TX2X3SRPGRGEPRFIX4VGYVDDTX5FVRFDSDAX6SP
RX7X8PRAPWIEQEGPEYWDRX9TQX10X11KTX12X13TQX14YX15
X16NLX17X18X19X20YYNQSEAGSHX21X22QX23MYGCDLGPDGRLL
RGHDQSAYDGKDYIALNEDLX24SWTAADTAAQIX25QRKX26EAARX27
AEQX28RX29YLEGX30CVEWLRRYLENGKX31X32LX33RADPPKTH
VTHHPX34SDHEATLRCWALGFYPAEITLTWQRDGEDQTQDTELVETRP
AGDRTFQKWAAVVVPSGEEQRYTCHVQHEGLPKPLTLRWEP,

wherein X1 is H, Y, or D; X2 is A or S; X3 is M or V; X4 is A, S, or T; X5 is Q or L; X6 is A or T; X7 is E, M K, or T; X8 is A or T; X9 is E or N; X10 is I or K; X11 is Y, F, S, or C; X12 is N or Q; X13 is A or T; X14 is D or Y; X15 is E or V; X16 is S or N; X17 is T, N, or I; X18 is A or L; X19 is L, or R; X20 is R or G; X21 is T or I; X22 is L or I; X23 is R or S; X24 is R or S; X25 is S or T; X26 is L or W; X27 is E OR V; X28 is R, D, L or W; X29 is A or T; X30 is L, E or T; X31 is E or D; X32 is K or T; X33 is E or Q; and X34 is I or V.

[0106] As an example, an MHC Class I heavy chain polypeptide of a TMMP of the present disclosure can comprise an amino acid sequence having at least 75%, at least 80%, at least 85%, at least 90%, at least 95%, at least 98%, at least 99%, or 100%, amino acid sequence identity to the following human HLA-B heavy chain amino acid sequence:

(SEQ ID NO: 304)
[sequence omitted]

### HLA-B (Y84A; A236C)

[0107] As one non-limiting example, in some cases, the MHC Class I heavy chain polypeptide is an HLA-B polypeptide that comprises Y84A and A236C substitutions. For example, in some cases, the MHC Class I heavy chain polypeptide comprises an amino acid sequence having at least 75%, at least 80%, at least 85%, at least 90%, at least 95%, at least 98%, at least 99%, or 100%, amino acid sequence identity to the following human HLA-B heavy chain (Y84A; A236C) amino acid sequence:

(SEQ ID NO: 305)
GSHSMRYFYTSVSRPGRGEPRFISVGYVDDTQFVRFDSDAASPREEPRAP
WIEQRGPEYWDRNTQIYKAQAQTDRESLRNLRGAYNQSEAGSHTLQSMYG
CDVGPDGRLLRGHDQYAYDGKDYIALNEDLKSWTAADTAAQITQRKWEAA
REAEQRRAYLEGECVEWLRRYLENGKDKLERADPPKTHVTHHPISDHEAT
LRCWALGFYPAEITLTWQRDGEDQTQDTELVETRPCGDRTFQKWAAVVVP
SGEEQRYTCHVQHEGLPKPLTLRWEP,

where amino acid 84 is Ala and amino acid 236 is Cys. In some cases, the Cys-236 forms an interchain disulfide bond with Cys-12 of a variant β2M polypeptide that comprises an R12C substitution.

### HLA-B (Y84C; A139C)

[0108] In some cases, the MHC Class I heavy chain polypeptide comprises Y84C and A139C substitutions. For example, in some cases, the MHC Class I heavy chain polypeptide comprises an amino acid sequence having at least 75%, at least 80%, at least 85%, at least 90%, at least 95%, at least 98%, at least 99%, or 100%, amino acid sequence identity to the following human HLA-B heavy chain (Y84C; A139C) amino acid sequence:

(SEQ ID NO: 306)
GSHSMRYFYTSVSRPGRGEPRFISVGYVDDTQFVRFDSDAASPREEPRAP
WIEQEGPEYWDRNTQIYKAQAQTDRESLRNLRGCYNQSEAGSHTLQSMYG
CDVGPDGRLLRGHDQYAYDGKDYIALNEDLRSWTAADTCAQITQRKWEAA
REAEQRRAYLEGECVEWLRRYLENGKDKLERADPPKTHVTHHPISDHEAT
LRCWALGFYPAEITLTWQRDGEDQTQDTELVETRPAGDRTFQKWAAVVVP
SGEEQRYTCHVQHEGLPKPLTLRWEP,

where amino acid 84 is Cys and amino acid 139 is Cys. In some cases, Cys-84 forms an intrachain disulfide bond with Cys-139.

### HLA-B*0702

[0109] As an example, in some cases, a MHC Class I heavy chain polypeptide present in a TMMP of the present disclosure comprises an amino acid sequence of HLA-B*0702 (SEQ ID NO:207) in FIG. 12, or a sequence having at least 75% (e.g., at least 80%, at least 85%, at least 90%, at least 95%, at least 98%, at least 99%) or 100%, amino acid sequence identity to all or part (e.g., 50, 75, 100, 150, 200, or 250 contiguous amino acids) of that sequence (e.g., it may comprise 1-25, 1-5, 5-10, 10-15, 15-20, 20-25, or 25-30 amino acid insertions, deletions, and/or substitutions). In some cases, where the HLA-B heavy chain polypeptide of TMMP of the present disclosure has less than 100% identity to the sequence labeled HLA-B in FIG. 10, or labeled “B0802 in FIG. 12, it may comprise a mutation at one or more of positions 84, 139 and/or 236 selected from: a tyrosine to alanine substitution at position 84 (Y84A); a tyrosine to cysteine substitution at position 84 (Y84C); an alanine to cysteine at position 139 (A139C); and an alanine to cysteine substitution at position 236 (A236C). In some cases, the HLA-B heavy chain polypeptide of TMMP of the present disclosure comprises Y84A and A236C substitutions. In some cases, the HLA-B*701 heavy chain polypeptide of TMMP of the present disclosure comprises Y84C and A139C substitutions. In some cases, the HLA-B heavy chain polypeptide of TMMP of the present disclosure comprises Y84C, A139C and A236C substitutions.

### HLA-C

[0110] In some cases, a TMMP of the present disclosure comprises an HLA-C heavy chain polypeptide. The HLA-C heavy chain polypeptide, or portions thereof, that may be that may be incorporated into a TMMP of the present disclosure include, but are not limited to, the alleles: C*0102, C*0303, C*0304, C*0401, C*0602, C*0701, C*0801, and C*1502, which are aligned without all, or substantially all, of the leader, transmembrane and cytoplasmic sequences in FIG. 13A. Any of those alleles may comprise a mutation at one or more of positions 84, 139 and/or 236 (as shown in FIG. 13A) selected from: a tyrosine to alanine substitution at position 84 (Y84A); a tyrosine to cysteine substitution at position 84 (Y84C); an alanine to cysteine substitution at position 139 (A139C); and an alanine to cysteine substitution at position 236 (A236C). In addition, an HLA-C polypeptide comprising an amino acid sequence having at least 75% (e.g., at least 80%, at least 85%, at least 90%, at least 95%, at least 98%, at least 99%) or 100% amino acid sequence identity to all or part (e.g., 50, 75, 100, 150, 200, or 250 contiguous amino acids) of the sequence of those HLA-C alleles may also be employed (e.g., it may comprise 1-25, 1-5, 5-10, 10-15, 15-20, 20-25, or 25-30 amino acid insertions, deletions, and/or substitutions).

[0111] In some cases, a TMMP of the present disclosure comprises an HLA-C heavy chain polypeptide comprising the following HLA-C consensus amino acid sequence:

(SEQ ID NO: 31)
X1SHSMX2YFX3TAVSX4PGRGEPX5FIX6VGYVDDTQFVX7FDSDAASP
RGEPRX8PWVEQEGPEYWDRETQX9YKRQAQX10DRVX11LRX12LRGYY
NQSEX13X14SHX15X16QX17MX18GCDX19GPDGRLLRGX20X21Q
X22AYDGKDYIALNEDLRSWTAADTAAQITQRKX23EAARX24AEQX25R
AYLEGX26CVEWLRRYLX27NGKX28TLQRAEX29PKTHVTHHPX30SDH
EATLRCWALGFYPAEITLTWQX31DGEDQTQDTELVETRPAGDGTFQKWA
AVX32VPSGX33EQRYTCHX34QHEGLX35EPLTLX36WX37P,

wherein X1 is C or G; X2 is R or K; X3 is F, Y, S, or D; X4 is R or W; X5 is H or R; X6 is A or S; X7 is Q or R; X8 is A or E; X9 is N or K; X10 is T or A; X11 is S or N; X12 is N or K; X13 is A or D; X14 is G or R; X15 is T or I; X16 is L or I; X17 is W or R; X18 is C, Y, F, or S; X19 is L, or V; X20 is Y or H; X21 is D or N; X22 is Y, F, S, or L; X23 is L or W; X24 is E, A, Or T; X25 is R, L, or W; X26 is L or T; X27 is E OR K; X28 is E or K; X29 is H or P; X30 is R or V; X31 is W or R; X32 is V or M; X33 is E or Q; X34 is M or V; X35 is P or Q; X36 is R or S; and X37 is P or G.

[0112] As an example, an MHC Class I heavy chain polypeptide of a TMMP of the present disclosure can comprise an amino acid sequence having at least 75%, at least 80%, at least 85%, at least 90%, at least 95%, at least 98%, at least 99%, or 100%, amino acid sequence identity to the following human HLA-C heavy chain amino acid sequence:

(SEQ ID NO: 307)
CSHSMRYFDTAVSRPGRGEPRFISVGYVDDTQFVRFDSDAASPRGEPRA
PWVEQEGPEYWDRETQNYKRQAQADRVSLRNLRGYYNQSEDGSHTLQRM
YGCDLGPDGRLLRGYDQSAYDGKDYIALNEDLRSWTAADTAAQITQRKL
EAARAAEQLRAYLEGTCVEWLRRYLENGKETLQRAEPPKTHVTHHPLSD
HEATLRCWALGFYPAEITLTWQRDGEDQTQDTELVETRPAGDGTFQKWA
AVVVPSGQEQRYTCHMQHEGLQEPLTLSWEP.

### HLA-C (Y84A; A236C)

[0113] As one non-limiting example, in some cases, the MHC Class I heavy chain polypeptide is an HLA-C polypeptide that comprises Y84A and A236C substitutions. For example, in some cases, the MHC Class I heavy chain polypeptide comprises an amino acid sequence having at least 75%, at least 80%, at least 85%, at least 90%, at least 95%, at least 98%, at least 99%, or 100%, amino acid sequence identity to the following human HLA-C heavy chain (Y84A; A236C) amino acid sequence:

(SEQ ID NO: 308)
CSHSMRYFDTAVSRPGRGEPRFISVGYVDDTQFVRFDSDAASPRGEPRA
PWVEQEGPEYWDRETQNYKRQAQADRVSLRNLRGAYNQSEDGSHTLQRM
YGCDLGPDGRLLRGYDQSAYDGKDYIALNEDLRSWTAADTAAQITQRKL
EAARAAEQLRAYLEGTCVEWLRRYLENGKETLQRAEPPKTHVTHHPLSD
HEATLRCWALGFYPAEITLTWQRDGEDQTQDTELVETRPCGDGTFQKWA
AVVVPSGQEQRYTCHMQHEGLQEPLTLSWEP,

where amino acid 84 is Ala and amino acid 236 is Cys. In some cases, the Cys-236 forms an interchain disulfide bond with Cys-12 of a variant β2M polypeptide that comprises an R12C substitution.

### HLA-C (Y84C; A139C)

[0114] In some cases, the MHC Class I heavy chain polypeptide comprises Y84C and A139C substitutions. For example, in some cases, the MHC Class I heavy chain polypeptide comprises an amino acid sequence having at least 75%, at least 80%, at least 85%, at least 90%, at least 95%, at least 98%, at least 99%, or 100%, amino acid sequence identity to the following human HLA-C heavy chain (Y84C; A139C) amino acid sequence:

(SEQ ID NO: 397)
CSHSMRYFDTAVSRPGRGEPRFISVGYVDDTQFVRFDSDAASPRGEPRA
PWVEQEGPEYWDRETQNYKRQAQADRVSLRNLRGCYNQSEDGSHTLQRM
YGCDLGPDGRLLRGYDQSAYDGKDYIALNEDLRSWTAADTCAQITQRKL
EAARAAEQLRAYLEGTCVEWLRRYLENGKETLQRAEPPKTHVTHHPLSD
HEATLRCWALGFYPAEITLTWQRDGEDQTQDTELVETRPAGDGTFQKWA
AVVVPSGQEQRYTCHMQHEGLQEPLTLSWEP,

where amino acid 84 is Cys and amino acid 139 is Cys. In some cases, Cys-84 forms an intrachain disulfide bond with Cys-139.

### HLA-C*0701

[0115] In some cases, a MHC Class I heavy chain polypeptide of a TMMP of the present disclosure comprises an amino acid sequence of HLA-C*0701 of FIG. 13A (labeled HLA-C in FIG. 10), or an amino acid sequence having at least 75% (e.g., at least 80%, at least 85%, at least 90%, at least 95%, at least 98%, at least 99%) or 100% amino acid sequence identity to all or part (e.g., 50, 75, 100, 150, 200, or 250 contiguous amino acids) of that sequence (e.g., it may comprise 1-25, 1-5, 5-10, 10-15, 15-20, 20-25, or 25-30 amino acid insertions, deletions, and/or substitutions). In some cases, where the HLA-C heavy chain polypeptide of a TMMP of the present disclosure has less than 100% identity to the sequence labeled MA-C*0701 in FIG. 13A, it may comprise a mutation at one or more of positions 84, 139 and/or 236 selected from: a tyrosine to alanine substitution at position 84 (Y84A); a tyrosine to cysteine substitution at position 84 (Y84C); an alanine to cysteine at position 139 (A139C); and an alanine to cysteine substitution at position 236 (A236C). In some cases, the HLA-C heavy chain polypeptide of a TMMP of the present disclosure comprises Y84A and A236C substitutions. In some cases, the HLA-C*0701 heavy chain polypeptide of a T-Cell-MMP or its epitope conjugate comprises Y84C and A139C substitutions. In some cases, the HLA-C heavy chain polypeptide of a TMMP of the present disclosure comprises Y84C, A139C and A236C substitutions.

### Non-Classical HLA-E, -F, and -G MHC Class I Heavy Chains

[0116] In some cases, a TMMP of the present disclosure comprises a non-classical MHC Class I heavy chain polypeptide. The non-classical HLA heavy chain polypeptides, or portions thereof, that may be that may be incorporated into a TMMP of the present disclosure include, but are not limited to, those of HLA-E, -F, and -G alleles. Amino acid sequences for HLA-E, -F, and -G heavy chain polypeptides, (and the HLA-A, B and C alleles) may be found on the world wide web hla.alleles.org/nomenclature/index.html, the European Bioinformatics Institute (www(dot)ebi(dot)ac(dot)uk), which is part of the European Molecular Biology Laboratory (EMBL), and at the National Center for Biotechnology Information (www(dot)ncbi(dot)nlm(dot)nih(dot)gov).

[0117] Non-limiting examples of suitable HLA-E alleles include, but are not limited to, HLA-E*0101 (HLA-E*01:01:01:01), HLA-E*01:03 (HLA-E*01:03:01:01), HLA-E*01:04, HLA-E*01:05, HLA-E*01:06, HLA-E*01:07, HLA-E*01:09, and HLA-E*01:10. Non-limiting examples of suitable HLA-F alleles include, but are not limited to, HLA-F*0101 (HLA-F*01:01:01:01), HLA-F*01:02, HLA-F*01:03 (HLA-F*01:03:01:01), HLA-F*01:04, HLA-F*01:05, and HLA-F*01:06. Non-limiting examples of suitable HLA-G alleles include, but are not limited to, HLA-G*0101 MLA-G*01:01:01:01), HLA-G*01:02, HLA-G*01:03 (HLA-G*01:03:01:01), HLA-G*01:04 (HLA-G*01:04:01:01), HLA-G*01:06, HLA-G*01:07, HLA-G*01:08, HLA-G*01:09: HLA-G*01:10, HLA-G*01:10, HLA-G*01:11, HLA-G*01:12, HLA-G*01:14, HLA-G*01:15, HLA-G*01:16, HLA-G*01:17, HLA-G*01:18: HLA-G*01:19, HLA-G*01:20, and HLA-G*01:22. Consensus sequences for those HLA E, -F and -G alleles without all, or substantially all, of the leader, transmembrane and cytoplasmic sequences are provided in FIG. 14, and aligned with consensus sequences of the above-mentioned HLA-A, -B and -C alleles in FIG. 15.

[0118] FIG. 14 provides a consensus sequence for each of HLA-E, -F, and -G with the variable aa positions indicated as “X” residues sequentially numbered and the locations of aas 84, 139 and 236 double underlined.

[0119] FIG. 15 provides an alignment of the consensus amino acid sequences for HLA-A, -B, -C, -E, -F, and -G, which are given in FIGS. 11-15. Variable residues in each sequence are listed as “X” with the sequential numbering removed. As indicated in FIG. 10 the locations of aas 84, 139 and 236 are indicated with their flanking five-amino acid clusters that may be replaced by 1 to 5 amino acids selected independently from (i) any naturally occurring amino acid or (ii) any naturally occurring amino acid except proline or glycine are also shown.

[0120] Any of the above-mentioned HLA-E, -F, and/or -G alleles may comprise a substitution at one or more of positions 84, 139 and/or 236 as shown in FIG. 15 for the consensus sequences. In some cases, the substitutions may be selected from a: position 84 tyrosine to alanine (Y84A) or cysteine (Y84C), or, in the case of HLA-F, an R84A or R84C substitution; a position 139 alanine to cysteine (A139C), or, in the case of HLA-F, a V139C; and an alanine to cysteine substitution at position 236 (A236C). In addition, an HLA-E, -F and/or -G sequence having at least 75% (e.g., at least 80%, at least 85%, at least 90%, at least 95%, at least 98%, at least 99%) or 100% amino acid sequence identity to all or part (e.g., 50, 75, 100, 150, 200, or 250 contiguous amino acids) of any of the consensus sequences of set forth in FIG. 15 may also be employed (e.g., the sequences may comprise 1-25, 1-5, 5-10, 10-15, 15-20, 20-25, or 25-30 amino acid insertions, deletions, and/or substitutions in addition to changes at variable residues listed therein).

### Mouse H2K

[0121] In some cases, a MHC Class I heavy chain polypeptide present in a TMMP of the present disclosure comprises an amino acid sequence of MOUSE H2K (SEQ ID NO:45) (MOUSE H2K in FIG. 10), or a sequence having at least 75%, at least 80%, at least 85%, at least 90%, at least 95%, at least 98%, at least 99%, or 100% amino acid sequence identity to all or part (e.g., 50, 75, 100, 150, 200, or 250 contiguous amino acids) of that sequence (e.g., it may comprise 1-25, 1-5, 5-10, 10-15, 15-20, 20-25, or 25-30 amino acid insertions, deletions, and/or substitutions). In some cases, where the MOUSE H2K heavy chain polypeptide of a TMMP of the present disclosure has less than 100% identity to the sequence labeled MOUSE H2K in FIG. 10, it may comprise a mutation at one or more of positions 84, 139 and/or 236 selected from: a tyrosine to alanine at position 84 (Y84A); a tyrosine to cysteine at position 84 (Y84C); an alanine to cysteine at position 139 (A139C); and an alanine to cysteine substitution at position 236 (A236C). In some cases, the MOUSE H2K heavy chain polypeptide of a TMMP of the present disclosure comprises Y84A and A236C substitutions. In some cases, the MOUSE H2K heavy chain polypeptide of a TMMP of the present disclosure comprises Y84C and A139C substitutions. In some cases, the MOUSE H2K heavy chain polypeptide of a TMMP of the present disclosure comprises Y84C, A139C and A236C substitutions.

### Exemplary Combinations

[0122] Table 1, below, presents various combinations of MHC Class I heavy chain sequence modifications that can be incorporated in a TMMP of the present disclosure.

TABLE 1

| | | | Specific |
|---|---|---|---|
| | | Sequence | Substitutions at aa |
| | HLA Heavy | Identity | positions 84, 139 |
| Entry | Chain Sequence | Range‡ | and/or 236 |
| 1 | HLA-A | 75%-99.8%, 80%-99.8%, 85%-99.8%, | None; Y84C; Y84A; |
| | Consensus | 90%-99.8%, 95%-99.8%, 98%-99.8%, | A139C; A236C; |
| | (FIG. 11B) | or 99%-99.8%; or 1-25, 1-5, 5-10, 10- | (Y84A & A236C); |
| | | 15, 15-20, or 20-25 aa insertions, | (Y84C & A139C); or |
| | | deletions, and/or substitutions (not | (Y84C, A139C & |
| | | counting variable residues) | A236C) |
| 2 | A*0101, A*0201, | 75%-99.8%, 80%-99.8%, 85%-99.8%, | None; Y84C; Y84A; |
| | A*0301, A*1101, | 90%-99.8%, 95%-99.8%, 98%-99.8%, | A139C; A236C; |
| | A*2402, A*2301, | or 99%-99.8%; or 1-25, 1-5, 5-10, 10- | (Y84A & A236C); |
| | A*2402, A*2407, | 15, 15-20, or 20-25 aa insertions, | (Y84C & A139C); or |
| | A*3303, or | deletions, and/or substitutions | (Y84C, A139C & |
| | A*3401 | | A236C) |
| | (FIG. 11A) | | |
| 3 | HLA-B | 75%-99.8%, 80%-99.8%, 85%-99.8%, | None; Y84C; Y84A; |
| | Consensus | 90%-99.8%, 95%-99.8%, 98%-99.8%, | A139C; A236C; |
| | (FIG. 12B) | or 99%-99.8%; or 1-25, 1-5, 5-10, 10- | (Y84A & A236C); |
| | | 15, 15-20, or 20-25 aa insertions, | (Y84C & A139C); or |
| | | deletions, and/or substitutions (not | (Y84C, A139C & |
| | | counting variable residues) | A236C) |
| 4 | B*0702, B*0801, | 75%-99.8%, 80%-99.8%, 85%-99.8%, | None; Y84C; Y84A; |
| | B*1502, B*3802, | 90%-99.8%, 95%-99.8%, 98%-99.8%, | A139C; A236C; |
| | B*4001, B*4601, | or 99%-99.8%; or 1-25, 1-5, 5-10, 10- | (Y84A & A236C); |
| | or B*5301 | 15, 15-20, or 20-25 aa insertions, | (Y84C & A139C); or |
| | (FIG. 12A) | deletions, and/or substitutions | (Y84C, A139C & |
| | | | A236C) |
| 5 | HLA-C | 75%-99.8%, 80%-99.8%, 85%-99.8%, | None; Y84C; Y84A; |
| | Consensus | 90%-99.8%, 95%-99.8%, 98%-99.8%, | A139C; A236C; |
| | (FIG. 13B) | or 99%-99.8%; or 1-25, 1-5, 5-10, 10- | (Y84A & A236C); |
| | | 15, 15-20, or 20-25 aa insertions, | (Y84C & A139C); or |
| | | deletions, and/or substitutions (not | (Y84C, A139C & |
| | | counting variable residues) | A236C) |
| 6 | C*0102, C*0303, | 75%-99.8%, 80%-99.8%, 85%-99.8%, | None; Y84C; Y84A; |
| | C*0304, C*0401, | 90%-99.8%, 95%-99.8%, 98%-99.8%, | A139C; A236C; |
| | C*0602, C*0701, | or 99%-99.8%; or 1-25, 1-5, 5-10, 10- | (Y84A & A236C); |
| | C*0801, or | 15, 15-20, or 20-25 aa insertions, | (Y84C & A139C); or |
| | C*1502 | deletions, and/or substitutions | (Y84C, A139C & |
| | (FIG. 13A) | | A236C) |
| 7 | HLA-E, F, or G | 75%-99.8%, 80%-99.8%, 85%-99.8%, | None; Y84C; Y84A; |
| | Consensus | 90%-99.8%, 95%-99.8%, 98%-99.8%, | A139C; A236C; |
| | (FIG. 14) | or 99%-99.8%; or 1-25, 1-5, 5-10, 10- | (Y84A & A236C); |
| | | 15, 15-20, or 20-25 aa insertions, | (Y84C & A139C); or |
| | | deletions, and/or substitutions (not | (Y84C, A139C & |
| | | counting variable residues) | A236C) |
| 8 | MOUSE H2K | 75%-99.8%, 80%-99.8%, 85%-99.8%, | None; Y84C; Y84A; |
| | (FIG. 10) | 90%-99.8%, 95%-99.8%, 98%-99.8%, | A139C; A236C; |
| | | or 99%-99.8%; or 1-25, 1-5, 5-10, 10- | (Y84A & A236C); |
| | | 15, 15-20, or 20-25 aa insertions, | (Y84C & A139C; or |
| | | deletions, and/or substitutions | (Y84C, A139C & |
| | | | A236C) |

‡The Sequence Identity Range is the permissible range in sequence identity of a MHC-H polypeptide sequence incorporated into a TMMP relative to the corresponding portion of the sequences listed in FIG. 10-15 not counting the variable residues in the consensus sequences.

### Beta-2 Microglobulin

[0123] A β2-microglobulin (β2M) polypeptide of a TMMP of the present disclosure can be a human β2M polypeptide, a non-human primate β2M polypeptide, a murine β2M polypeptide, and the like. In some instances, a β2M polypeptide comprises an amino acid sequence having at least 75%, at least 80%, at least 85%, at least 90%, at least 95%, at least 98%, at least 99%, or 100%, amino acid sequence identity to a β2M amino acid sequence depicted in FIG. 6. In some instances, a β2M polypeptide comprises an amino acid sequence having at least 75%, at least 80%, at least 85%, at least 90%, at least 95%, at least 98%, at least 99%, or 100%, amino acid sequence identity to amino acids 21 to 119 of a β2M amino acid sequence depicted in FIG. 6.

[0124] In some cases, a suitable β2M polypeptide comprises the following amino acid sequence:

(SEQ ID NO: 311)
IQRTPKIQVY SCHPAENGKS NFLNCYVSGF
HPSDIEVDLLKNGERIEKVE
HSDLSFSKDW SFYLLYYTEF TPTEKDEYAC RVNHVTLSQP
KIVKWDRDM;

and the HLA Class I heavy chain polypeptide comprises the following amino acid sequence:

(SEQ ID NO: 309)
GSHSMRYFFTSVSRPGRGEPRFIAVGYVDDTQFVRFDSDAASQRMEPRA
PWIEQEGPEYWDGETRKVKAHSQTHRVDL(aa1)(C)(aa2)AGSHTVQ
RMYGCDVGSDWRFLRGYHQYAYDGKDYIALKEDLRSW(aa3)(C)
(aa4)HKWEAAHVAEQLRAYLEGTCVEWLRRYLENGKETLQRTDAPKTH
MTHHAVSDHEATLRSWALSFYPAEITLTWQRDGEDQTQDTEL(AA5)
(C)(aa6)QKWAAVVVPSGQEQRYTCHVQHEGLPKPLTLRWEP,

where the cysteine residues indicated as {C} form an disulfide bond between the α1 and α2-1 helices and the (C) residue forms a disulfide bond with the β2M polypeptide cysteine at position 12. In the sequence above, “aa1” is “amino acid cluster 1”; “aa2” is “amino acid cluster 2”; “aa3” is “amino acid cluster 3”; “aa4” is “amino acid cluster 4”; “aa5” is “amino acid cluster 5”; and “aa6” is “amino acid cluster 6”; see, e.g., FIG. 10. Each occurrence of aa1, aa2, aa3, aa4, aa5, and aa6 is and independently selected to be 1-5 amino acid residues, wherein the amino acid residues are i) selected independently from any naturally occurring (e.g., encoded) amino acid or ii) any naturally occurring amino acid except proline or glycine.

[0125] In some cases, an MHC polypeptide comprises a single amino acid substitution relative to a reference MHC polypeptide (where a reference MHC polypeptide can be a wild-type MHC polypeptide), where the single amino acid substitution substitutes an amino acid with a cysteine (Cys) residue. Such cysteine residues, when present in an MHC polypeptide of a first polypeptide of a TMMP of the present disclosure, can form a disulfide bond with a cysteine residue present in a second polypeptide chain of a TMMP of the present disclosure.

[0126] In some cases, a first MHC polypeptide in a first polypeptide of a TMMP of the present disclosure, and/or the second MHC polypeptide in the second polypeptide of a TMMP of the present disclosure, includes an amino acid substitution to substitute an amino acid with a cysteine, where the substituted cysteine in the first MHC polypeptide forms a disulfide bond with a cysteine in the second MHC polypeptide, where a cysteine in the first MHC polypeptide forms a disulfide bond with the substituted cysteine in the second MHC polypeptide, or where the substituted cysteine in the first MHC polypeptide forms a disulfide bond with the substituted cysteine in the second MHC polypeptide.

[0127] For example, in some cases, one of following pairs of residues in an HLA β2-microglobulin and an HLA Class I heavy chain is substituted with cysteines (where residue numbers are those of the mature polypeptide): 1) β2M residue 12, HLA Class I heavy chain residue 236; 2) β2M residue 12, HLA Class I heavy chain residue 237; 3) β2M residue 8, HLA Class I heavy chain residue 234; 4) β2M residue 10, HLA Class I heavy chain residue 235; 5) β2M residue 24, HLA Class I heavy chain residue 236; 6) β2M residue 28, HLA Class I heavy chain residue 232; 7) β2M residue 98, HLA Class I heavy chain residue 192; 8) β2M residue 99, HLA Class I heavy chain residue 234; 9) β2M residue 3, HLA Class I heavy chain residue 120; 10) β2M residue 31, HLA Class I heavy chain residue 96; 11) β2M residue 53, HLA Class I heavy chain residue 35; 12) β2M residue 60, HLA Class I heavy chain residue 96; 13) β2M residue 60, HLA Class I heavy chain residue 122; 14) β2M residue 63, HLA Class I heavy chain residue 27; 15) β2M residue Arg3, HLA Class I heavy chain residue Gly120; 16) β2M residue His31, HLA Class I heavy chain residue Gln96; 17) β2M residue Asp53, HLA Class I heavy chain residue Arg35; 18) β2M residue Trp60, HLA Class I heavy chain residue Gln96; 19) β2M residue Trp60, HLA Class I heavy chain residue Asp122; 20) β2M residue Tyr63, HLA Class I heavy chain residue Tyr27; 21) β2M residue Lys6, HLA Class I heavy chain residue Glu232; 22) β2M residue Gln8, HLA Class I heavy chain residue Arg234; 23) β3M residue Tyr10, HLA Class I heavy chain residue Pro235; 24) β2M residue Ser11, HLA Class I heavy chain residue Gln242; 25) β2M residue Asn24, HLA Class I heavy chain residue Ala236; 26) β2M residue Ser28, HLA Class I heavy chain residue Glu232; 27) β2M residue Asp98, HLA Class I heavy chain residue His192; and 28) β2M residue Met99, HLA Class I heavy chain residue Arg234. The amino acid numbering of the MHC/HLA Class I heavy chain is in reference to the mature MHC/HLA Class I heavy chain, without a signal peptide. For example, in some cases, residue 236 of the mature HLA-A amino acid sequence is substituted with a Cys. In some cases, residue 236 of the mature HLA-B amino acid sequence is substituted with a Cys. In some cases, residue 236 of the mature HLA-C amino acid sequence is substituted with a Cys. In some cases, residue 32 (corresponding to Arg-12 of mature β2M) of an amino acid sequence depicted in FIG. 6 is substituted with a Cys.

[0128] In some cases, a β2M polypeptide comprises the amino acid sequence:

(SEQ ID NO: 310)
IQRTPKIQVY SRHPAENGKS NFLNCYVSGF
HPSDIEVDLLKNGERIEKVE HSDLSFSKDW SFYLLYYTEF
TPTEKDEYAC RVNHVTLSQP KIVKWDRDM.

In some cases, a β2M polypeptide comprises the amino acid sequence:

(SEQ ID NO: 311)
IQRTPKIQVY SCHPAENGKS NFLNCYVSGF
HPSDIEVDLLKNGERIEKVE
HSDLSFSKDW SFYLLYYTEF TPTEKDEYAC RVNHVTLSQP
KIVKWDRDM.

[0129] In some cases, an HLA Class I heavy chain polypeptide comprises the amino acid sequence:

(SEQ ID NO: 297)
GSHSMRYFFTSVSRPGRGEPRFIAVGYVDDTQFVRFDSDAASQRMEPR
APWIEQEGPEYWDGETRKVKAHSQTHRVDLGTLRGYYNQSEAGSHTVQ
RMYGCDVGSDWRFLRGYHQYAYDGKDYIALKEDLRSWTAADMAAQTTK
HKWEAAHVAEQLRAYLEGTCVEWLRRYLENGKETLQRTDAPKTHMTHH
AVSDHEATLRCWALSFYPAEITLIWQRDGEDQTQDTELVETRPAGDGT
FQKWAAVVVPSGQEQRYTCHVQHEGLPKPLTLRWEP.

[0130] In some cases, an HLA Class I heavy chain polypeptide comprises the amino acid sequence:

(SEQ ID NO: 312)
GSHSMRYFFTSVSRPGRGEPRFIAVGYVDDTQFVRFDSDAASQRMEPR
APWIEQEGPEYWDGETRKVKAHSQTHRVDLGTLRGYYNQSEAGSHTVQ
RMYGCDVGSDWRFLRGYHQYAYDGKDYIALKEDLRSWTAADMAAQTTK
HKWEAAHVAEQLRAYLEGTCVEWLRRYLENGKETLQRTDAPKTHMTHH
AVSDHEATLRCWALSFYPAEITLIWQRDGEDQTQDTELVETRPCGDGT
FQKWAAVVVPSGQEQRYTCHVQHEGLPKPLTLRWEP.

[0131] In some cases, an HLA Class I heavy chain polypeptide comprises the amino acid sequence:

(SEQ ID NO: 313)
GSHSMRYFFTSVSRPGRGEPRFIAVGYVDDTQFVRFDSDAASQRMEPR
APWIEQEGPEYWDGETRKVKAHSQTHRVDLGTLRGYYNQSEAGSHTVQ
RMYGCDVGSDWRFLRGYHQYAYDGKDYIALKEDLRSWTAADMAAQTTK
HKWEAAHVAEQLRAYLEGTCVEWLRRYLENGKETLQRTDAPKTHMTHH
AVSDHEATLRCWALSFYPAEITLIWQRDGEDQTQDTELVETRPAGDGT
FQKWAAVVVPSGQEQRYTCHVQHEGLPKPLTLRWEP.

[0132] In some cases, the β2M polypeptide comprises the following amino acid sequence:

(SEQ ID NO: 311)
IQRTPKIQVY SCHPAENGKS NFLNCYVSGF
HPSDIEVDLLKNGERIEKVE HSDLSFSKDW
SFYLLYYTEF TPTEKDEYAC RVNHVTLSQP KIVKWGRDM;

and the HLA Class I heavy chain polypeptide of a TMMP of the present disclosure comprises the following amino acid sequence:

(SEQ ID NO: 312)
GSHSMRYFFTSVSRPGRGEPRFIAVGYVDDTQFVRFDSDAASQRMEPRAP
WIEQEGPEYWDGETRKVKAHSQTHRVDLGTLRGYYNQSEAGSHTVQRMYG
CDVGSDWRFLRGYHQYAYDGKDYIALKEDLKSWTAADMAAQTTKHKWEAA
HVAEQLRAYLEGTCVEWLRRYLENGKETLQRTDAPKTHMTHHAVSDHEAT
LRCWALSFYPAEITLTWQRDGEDQTQDTELVETRPCGDGTFQKWAAVVVP
SGQEQRYTCHVQHEGLPKPLTLRWEP,

where the Cys residues that are underlined and in bold form a disulfide bond with one another in the TMMP.

[0133] In some cases, the β2M polypeptide comprises the amino acid sequence:

(SEQ ID NO: 314)
IQRTPKIQVYSCHPAENGKSNFLNCYVSGFHPSDIEVDLLKNGERIEKVEH
SDLSFSKDWSFYLLYYTEFTPTEKDEYACRVNHVTLSQPKIVKWDRDM.

[0134] In some cases, the first polypeptide and the second polypeptide of a TMMP of the present disclosure are disulfide linked to one another through: i) a Cys residue present in a linker connecting the peptide epitope and a β2M polypeptide in the first polypeptide chain; and ii) a Cys residue present in an MHC Class I heavy chain in the second polypeptide chain. In some cases, the Cys residue present in the MHC Class I heavy chain is a Cys introduce as a Y84C substitution. In some cases, the linker connecting the peptide epitope and the β2M polypeptide in the first polypeptide chain is GCGGS(G4S)n (SEQ ID NO:315), where n is 1, 2, 3, 4, 5, 6, 7, 8, or 9. For example, in some cases, the linker comprises the amino acid sequence GCGGSGGGGSGGGGSGGGGS (SEQ ID NO:316). As another example, the linker comprises the amino acid sequence GCGGSGGGGSGGGGS (SEQ ID NO:317). Examples of disulfide-linked first and second polypeptides of a TMMP of the present disclosure are depicted schematically in FIG. 2A-2F.

### Multiple Disulfide Bonded TMMPs

[0135] In some cases, the first polypeptide and the second polypeptide of a TMMP of the present disclosure are linked to one another by at least two disulfide bonds (i.e., two interchain disulfide bonds). Examples of such multiple disulfide-linked TMMP are depicted schematically in FIGS. 16A and 16B and in FIG. 20A-20C. In addition, where a TMMP of the present disclosure comprises an IgFc polypeptide, a heterodimeric TMMP can be dimerized, such that disulfide bonds link the IgFc polypeptides in the two heterodimeric TMMPs. Such an arrangement is depicted schematically in FIGS. 16C and 16D, where disulfide bonds are represented by dashed lines. Unless otherwise stated, the at least two disulfide bonds described in the multiple disulfide-linked TMMPPs. In this section are not referring to disulfide bonds linking IgFc polypeptides in dimerized TMMPs.

[0136] As noted above, in some cases, the first polypeptide and the second polypeptide of a TMMP of the present disclosure are linked to one another by at least two disulfide bonds (i.e., two interchain disulfide bonds). For example, in some instances, the first polypeptide and the second polypeptide of a TMMP of the present disclosure are linked to one another by 2 interchain disulfide bonds. As another example, in some instances, the first polypeptide and the second polypeptide of a TMMP of the present disclosure, are linked to one another by 3 interchain disulfide bonds. As another example, in some instances, the first polypeptide and the second polypeptide of a TMMP of the present disclosure are linked to one another by 4 interchain disulfide bonds.

[0137] In some cases where a peptide epitope in a first polypeptide of a TMMP of the present disclosure is linked to a β2M polypeptide by a linker comprising a Cys, at least one of the at least two disulfide bonds links a Cys in the linker to a Cys in an MHC Class I heavy chain in the second polypeptide. In some cases, where a peptide epitope in a first polypeptide of a TMMP of the present disclosure is linked to an MHC Class I heavy chain polypeptide by a linker, at least one of the at least two disulfide bonds links a Cys in the linker to a Cys in a β2M polypeptide present in the second polypeptide.

[0138] In some cases, a multiple disulfide-linked TMMP of the present disclosure (e.g., a double disulfide-linked TMMP) exhibits increased stability, compared to a control TMMP that includes only one of the at least two disulfide bonds. In some cases, a multiple disulfide-linked TMMP (e.g., a double disulfide-linked TMMP) of the present disclosure exhibits increased in vitro stability, compared to a control TMMP that includes only one of the at least two disulfide bonds. For example, in some cases, a multiple disulfide-linked TMMP of the present disclosure (e.g., a double disulfide-linked TMMP) exhibits at least 5%, at least 10%, at least 15%, at least 20%, at least 25%, at least 50%, at least 2-fold, at least 5-fold, or at least 10-fold, greater in vitro stability, compared to a control TMMP that includes only one of the at least two disulfide bonds.

[0139] Whether a multiple disulfide-linked TMMP of the present disclosure exhibits increased in vitro stability, compared to a control TMMP that includes only one of the at least two disulfide bonds, can be determined by measuring the amount disulfide-linked heterodimeric TMMP present in a sample over time and/or under a specified condition and/or during purification of the TMMP.

[0140] For example, in some cases, a multiple disulfide-linked TMMP (e.g., a double disulfide-linked TMMP) of the present disclosure exhibits at least 5%, at least 10%, at least 15%, at least 20%, at least 25%, at least 50%, at least 2-fold, at least 5-fold, or at least 10-fold, greater in vitro stability, compared to a control TMMP that includes only one of the at least two disulfide bonds, when the TMMP is stored at 37° C. for a period of time (e.g., for a period of time of from about 1 week to about 2 weeks, from about 2 weeks to about 4 weeks, or from about 4 weeks to about 2 months). For example, in some cases, the amount of disulfide-linked heterodimeric TMMP remaining after storing a multiple disulfide-linked TMMP (e.g., a double disulfide-linked TMMP) of the present disclosure in vitro at 37° C. for 28 days is at least at least 5%, at least 10%, at least 15%, at least 20%, at least 25%, at least 50%, at least 2-fold, at least 5-fold, or at least 10-fold, greater than the amount of disulfide-linked heterodimeric TMMP remaining after storing a control TMMP (a TMMP that includes only one of the at least two disulfide bonds present in the multiple disulfide-linked TMMP) in vitro at 37° C. for 28 days.

[0141] As an example, a multiple disulfide-linked TMMP comprising polypeptides 1715 and 2364, as depicted in FIG. 17A, exhibits greater in vitro stability, compared to: a TMMP comprising polypeptides 2405 and 2760 as depicted in FIG. 17B, where such TMMP comprises only one disulfide linkage, where the single disulfide linkage is formed between: i) the Cys of the G2C tinker between the epitope and the β2M; and ii) the Cys provided by a Y84C substitution in the MHC Class I heavy chain. As another example, a multiple disulfide-linked TMMP comprising polypeptides 1715 and 2364, as depicted in FIG. 17A, exhibits greater in vitro stability, compared to: a TMMP comprising polypeptides 1380 and 2218, as depicted in FIG. 17C, where such TMMP comprises only one disulfide linkage, where the single disulfide linkage is formed between: i) the Cys provided by an R12C substitution in the β2M polypeptide; and ii) the Cys provided by the A236C substitution in the MHC Class I heavy chain.

[0142] In some cases, a multiple disulfide-linked TMMP of the present disclosure exhibits increased in vivo stability, compared to a control TMMP that includes only one of the at least two disulfide bonds. For example, in some cases, a multiple disulfide-linked TMMP of the present disclosure exhibits at least 5%, at least 10%, at least 15%, at least 20%, at least 25%, at least 50%, at least 2-fold, at least 5-fold, or at least 10-fold, greater in vivo stability, compared to a control TMMP that includes only one of the at least two disulfide bonds.

[0143] In some cases, the presence of two disulfide bonds in a multiple disulfide-linked TMMP of the present disclosure (e.g., a double disulfide-linked TMMP) provides for increased production of disulfide linked heterodimeric TMMP, compared to the amount of disulfide-linked heterodimeric TMMP produced when the TMMP is a control TMMP that includes only one of the at least two disulfide bonds. For example, a multiple disulfide-linked TMMP of the present disclosure (e.g., a double disulfide-linked TMMP) can be produced in a mammalian cell in in vitro cell culture, where the mammalian cell is cultured in a liquid cell culture medium. The TMMP can be secreted into the cell culture medium. The cells can be lysed, generating a cell lysate, and the TMMP can be present in the cell lysate. The TMMP can be purified from the cell culture medium and/or the cell lysate. For example, where the TMMP comprises an IgG1 Fc polypeptide, the cell culture medium and/or the cell lysate can be contacted with immobilized protein A (e.g., the cell culture medium and/or the cell lysate can be applied to a protein A column, where protein A is immobilized onto beads). TMMP present in the cell culture medium and/or the cell lysate becomes bound to the immobilized protein A. After washing the column to remove unbound materials, the hound TMMP is eluted, generating a protein A eluate. The amount of disulfide-linked heterodimeric TMMP present in the protein A eluate is a least 0.5%, at least 1%, at least 2%, at least 3%, at least 4%, at least 5%, at least 6%, at least 7%, at least 8%, at least 9%, or at least 10%, higher than the amount of disulfide-linked heterodimeric TMMP present in the protein A eluate when the TMMP is a control TMMP that includes only one of the at least two disulfide bonds present in the multiple disulfide-linked TMMP (e.g., a double disulfide-linked TMMP). In some cases, the percent of the total TMMP protein in the eluate that is non-aggregated disulfide-linked heterodimeric TMMP is at least 70%, at least 75%, at least 80%, at least 85%, at least 90%, at least 95%, or at least 99%. The protein A eluate can be subjected to size exclusion chromatography (SEC) and/or one or more other additional purification steps.

[0144] In some cases, a T-cell modulatory multimeric polypeptide of the present disclosure comprises at least one heterodimer comprising: a) a first polypeptide comprising: i) an AFP peptide epitope, where the AFP peptide has a length of at least 4 amino acids (e.g., from 4 amino acids to 25 amino acids; e.g., the AFP peptide has a length of 4, 5, 6, 7, 8, 9, 10-15, 15-20, or 20-25 amino acids); and ii) first MHC polypeptide; b) a second polypeptide comprising a second MHC polypeptide, and c) at least one immunomodulatory polypeptide, where the first and/or the second polypeptide comprises the immunomodulatory polypeptide, and where the heterodimer comprises at least two disulfide bonds (e.g., two disulfide bonds) between the first polypeptide and the second polypeptide (e.g., the heterodimer comprises: i) a first disulfide bond linking the first polypeptide and the second polypeptide; and ii) a second disulfide bond linking the first polypeptide and the second polypeptide). Expressed another way, the first polypeptide comprises a first Cys residue that forms a disulfide bond (a first disulfide bond) with a first Cys residue in the second polypeptide; and the first polypeptide comprises a second Cys residue that forms a disulfide bond (a second disulfide bond) with a second Cys residue in the second polypeptide.

[0145] In some cases, a TMMP of the present disclosure comprises: a) a first polypeptide comprising, in order from N-terminus to C-terminus: i) a peptide epitope; ii) a peptide linker; and iii) polypeptide; and b) a second polypeptide comprising an MHC Class I heavy chain polypeptide, where one or both of the first and the second polypeptides comprises at least one immunomodulatory polypeptide, where the TMMP comprises: a) a first disulfide linkage between: i) a Cys present in the linker between the peptide epitope and the β2M polypeptide; and ii) a first Cys introduced into the MHC Class I heavy chain polypeptide; and b) at least a second disulfide linkage between the first polypeptide and the second polypeptide, where the at least a second disulfide linkage is between: i) a Cys in the first polypeptide that is C-terminal to the Cys present in the linker; and a Cys in the second polypeptide that is C-terminal to the first Cys introduced into the MHC Class I heavy chain polypeptide.

[0146] In some cases, a first and a second disulfide bond-forming Cys residues in a first or a second polypeptide of a TMMP of the present disclosure are from about 10 amino acids to about 200 amino acids apart from one another. For example, in some cases, a first and a second disulfide bond-forming Cys residues in a first or a second polypeptide of a POMP are from about 10 amino acids (aa) to about 15 aa, from about 15 aa to about 20 aa, from about 20 aa to about 25 aa, from about 25 aa to about 30 aa, from about 30 aa to about 40 aa, from about 40 aa to about 50 aa, from about 50 aa to about 60 aa, from about 60 aa to about 70 aa, from about 70 aa to about 80 aa, from about 80 aa to about 90 aa, from about 90 aa to about 100 aa, from about 100 aa to about 110 aa, from about 110 aa to about 120 aa, from about 120 aa to about 130 aa, from about 130 an to about 140 aa, from about 140 aa to about 150 aa, from about 150 aa to about 160 aa, from about 160 an to about 170 aa, from about 170 aa to about 180 aa, from about 180 aa to about 190 aa, or from about 190 aa to about 200 aa.

[0147] As an example, in some cases, the first and second disulfide bond-forming Cys residues in the first polypeptide of a TMMP of the present disclosure are from about 10 amino acids to about 80 amino acid residues apart from one another. For example, in some cases, the second disulfide bond-forming Cys residue in the first polypeptide is from about 10 amino acids to about 80 amino acids (e.g., from about 10 amino acids (aa) to about 15 aa, from about 15 aa to about 20 aa, from about 20 aa to about 25 aa, from about 25 aa to about 30 aa, from about 30 aa to about 40 aa, from about 40 aa to about. 50 aa, from about 50 aa to about 60 aa, from about 60 aa to about 70 aa, or from about 70 aa to about 80 aa) C-terminal to the first disulfide bond-forming Cys residue in the first polypeptide. In some cases, the second disulfide bond-forming Cys residue in the first polypeptide is 10 aa, 11 aa, 12 aa, 13 aa, 14 aa, 15 aa, 16 aa, 17 aa, 18 aa, 19 aa, 20 aa, 21 aa, 22 aa, 23 aa, 24 aa, or 25 aa, C-terminal to the first disulfide bond-forming Cys residue in the first polypeptide. In some cases, the second disulfide bond-forming Cys residue in the first polypeptide is 15 aa C-terminal to the first disulfide bond-forming Cys residue in the first polypeptide. In some cases, the second disulfide bond-forming Cys residue in the first polypeptide is 20 aa C-terminal to the first disulfide bond-forming Cys residue in the first polypeptide. In some cases, the second disulfide bond-forming Cys residue in the first polypeptide is 25 aa C-terminal to the first disulfide bond-forming Cys residue in the first polypeptide.

[0148] As another example, in some cases, the first and second disulfide bond-forming Cys residues in the second polypeptide of a TMMP of the present disclosure are from about 140 amino acids to about 160 amino acids apart from one another. For example, in some cases, the second disulfide bond-forming Cys residue in the second polypeptide is from about 140 amino acids to about 160 amino acids C-terminal to the first disulfide bond-forming Cys residue in the second polypeptide. In some cases, the second disulfide bond-forming Cys residue in the second polypeptide is 140 amino acids (aa), 141 aa, 142 aa, 143 aa, 144 aa, 145 aa, 146 aa, 147 aa, 148 aa, 149 aa, 150 aa, 151 aa, 152 aa, 153 aa, 154 aa, 155 aa, 156 aa, 157 aa, 158 aa, 159 aa, or 160 aa. C-terminal to the first disulfide bond-forming Cys residue in the second polypeptide.

[0149] A multiple disulfide-linked TMMP of the present disclosure (e.g., a double disulfide-linked TMMP) can comprise, for example: a) a first polypeptide comprising: i) an AFP peptide (e.g., an AFP peptide of from 4 amino acids to about 25 amino acids); and ii) a first MHC polypeptide, where the first polypeptide comprises a peptide linker between the AFP peptide and the first MHC polypeptide, where the peptide linker comprises a Cys residue, and where the first MHC polypeptide is a β2M polypeptide that comprises an amino acid substitution that introduces a Cys residue; b) and a second polypeptide comprising a second MHC polypeptide, where the second MHC polypeptide is a Class I heavy chain comprising a Y84C substitution and an A236C substitution, based on the amino acid numbering of HLA-A*0201 (depicted in FIG. 11A), or at corresponding positions in another Class I heavy chain allele, where the TMMP comprises a disulfide bond between the Cys residue in the peptide linker and the Cys residue at amino acid position 84 of the Class I heavy chain or corresponding position of another Class I heavy chain allele, and where the TMMP comprises a disulfide bond between the introduced Cys residue in the β2M polypeptide and the Cys at amino acid position 236 of the Class I heavy chain or corresponding position of another Class I heavy chain allele; and c) at least one immunomodulatory polypeptide, where the first and/or the second polypeptide comprises the at least one immunomodulatory polypeptide. Examples are depicted schematically in FIG. 16A and FIG. 16B.

[0150] In some cases, the peptide linker comprises the amino acid sequence GCGGS (SEQ ID NO:318). In some cases, the peptide linker comprises the amino acid sequence GCGGS(GGGGS)n (SEQ ID NO:319), where n is an integer from 1 to 10. In some cases, the peptide linker comprises the amino acid sequence GCGGS(GGGGS)n (SEQ ID NO:398), where n is 1. In some cases, the peptide tinker comprises the amino acid sequence GCGGS(GGGGS)n (SEQ ID NO:320), where n is 2. In some cases, the peptide linker comprises the amino acid sequence GCGGS(GGGGS)n (SEQ ID NO:321), where n is 3. In some cases, the peptide linker comprises the amino acid sequence GCGGS(GGGGS)n (SEQ ID NO:322), where n is 4. In some cases, the peptide linker comprises the amino acid sequence GCGGS(GGGGS)n (SEQ ID NO:323), where n is 5. In some cases, the peptide linker comprises the amino acid sequence GCGGS(GGGGS)n (SEQ ID NO:324), where n is 6. In some cases, the peptide linker comprises the amino acid sequence GCGGS(GGGGS)n (SEQ ID NO:325), where n is 7. In some cases, the peptide linker comprises the amino acid sequence GCGGS(GGGGS)n (SEQ ID NO:326), where n is 8. In some cases, the peptide linker comprises the amino acid sequence GCGGS(GGGGS)n (SEQ ID NO: 327), where n is 9. In some cases, the peptide linker comprises the amino acid sequence GCGGS(GGGGS)n (SEQ ID NO:328), where n is 10.

[0151] In some cases, the peptide linker comprises the amino acid sequence CGGGS (SEQ ID NO:329). In some cases, the peptide linker comprises the amino acid sequence CGGGS(GGGGS)n (SEQ ID NO: 330), where n is an integer from 1 to 10. In some cases, the peptide linker comprises the amino acid sequence CGGGS(GGGGS)n (SEQ ID NO:331), where n is 1. In some cases, the peptide linker comprises the amino acid sequence CGGGS(GGGGS)n (SEQ ID NO:332), where n is 2. In some cases, the peptide linker comprises the amino acid sequence CGGGS(GGGGS)n (SEQ ID NO:333), where n is 3. In some cases, the peptide linker comprises the amino acid sequence CGGGS(GGGGS)n (SEQ ID NO:334), where n is 4. In some cases, the peptide linker comprises the amino acid sequence CGGGS(GGGGS)n (SEQ ID NO:335), where n is 5. In some cases, the peptide linker comprises the amino acid sequence CGGGS(GGGGS)n (SEQ ID NO:336), where n is 6. In some cases, the peptide linker comprises the amino acid sequence CGGGS(GGGGS)n (SEQ ID NO:337), where n is 7. In some cases, the peptide linker comprises the amino acid sequence CGGGS(GGGGS)n (SEQ ID NO:338), where n is 8. In some cases, the peptide linker comprises the amino acid sequence CGGGS(GGGGS)n (SEQ ID NO:339), where n is 9. In some cases, the peptide linker comprises the amino acid sequence CGGGS(GGGGS)n (SEQ ID NO:340), where n is 10.

[0152] The following are non-limiting examples of MHC Class I heavy chain comprising a Y84C substitution and an A236C substitution, based on the amino acid numbering of HLA-A*0201 (depicted in FIG. 11A), or at corresponding positions in another Class I heavy chain allele.

### HLA-A

[0153] In some cases, a multiple disulfide-linked TMMP of the present disclosure (e.g., a double disulfide-linked TMMP) comprises: a) a first polypeptide comprising: i) an AFP peptide (e.g., an AFP peptide of from 4 amino acids to about 25 amino acids); and ii) a first MHC polypeptide, where the first polypeptide comprises a peptide linker between the AFP peptide and the first MHC polypeptide, where the peptide linker comprises a Cys residue, and where the first MHC polypeptide is a β2M polypeptide that comprises an amino acid substitution that introduces a Cys residue; and b) a second polypeptide comprising an HLA-A MHC Class I heavy chain comprising an amino acid sequence having at least 60%, at least 70%, at least 80%, at least 90%, at least 95%, at least 98%, at least 99%, or 100%, amino acid sequence identity to the following amino acid sequence:

(SEQ ID NO: 341)
GSHSMRYFFTSVSRPGRGEPRFIAVGYVDDTQFVRFDSDAASQRMEPRAP
WIEQEGPEYWDGETRKVKAHSQTHRVDLGTLRGCYNQSEAGSHTVQRMYG
CDVGSDWRFLRGYHQYAYDGKDYIALKEDLRSWTAADMAAQTTKHKWEAA
HVAEQLRAYLEGTCVEWLRRYLENGKETLQATDAPKTHMTHHAVSDHEAT
LRCWALSFYPAEITLTWQRDGEDQTQDTELVETRPCGDGTFQKWAAVVVP
SGQEQRYTCHVQHEGLPKPLTLRWEP,

where amino acid 84 is a Cys and amino acid 236 is a Cys; and c) at least one immunomodulatory polypeptide, where the first and/or the second polypeptide comprises the at least one immunomodulatory polypeptide. In some cases, the peptide linker comprises the amino acid sequence GCGGS (SEQ ID NO:318). In some cases, the peptide linker comprises the amino acid sequence GCGGS(GGGGS)n (SEQ ID NO:319), where n is an integer from 1 to 10. In some cases, the β2M polypeptide comprises an R12C substitution. For example, the β2M polypeptide can comprises an amino acid sequence having at least 90%, at least 95%, at least 98%, at least 99%, or 100%, amino acid sequence identity to the following amino acid sequence:

(SEQ ID NO:314)
IQRTPKIQVYSCHPAENGKSNFLNCYVSGFHPSDIEVDLLKNGERIEKV
EHSDLSFSKDWSFYLLYYTEFTPTEKDEYACRVNHVTLSQPKIVKWDRD
M,

where amino acid 12 is a Cys. The at least one immunomodulatory polypeptide can be a polypeptide that exerts an activating/stimulating effect on the target T cell or a suppressing/inhibitory effect on the target T cell. For example, the at least one immunomodulatory polypeptide can be a cytokine (e.g., an IL2 polypeptide, an IL7 polypeptide, an IL12 polypeptide, an IL15 polypeptide, an IL17 polypeptide, an IL21 polypeptide, an IL27 polypeptide, an IL-23 polypeptide, a TGFβ polypeptide, and the like; and including all family members, e.g., IL17A, IL-17B, IL-17C, IL-17D, IL-17E, IL-17F, IL-17E), a 4-1BBL polypeptide, an ICOS-L polypeptide, an OX-40L polypeptide, a CD80 polypeptide, a CD86 polypeptide, (CD80 and CD86 are also known as B7-1 and B7-2, respectively), a CD40 polypeptide, a CD70 polypeptide, a JAG1 (CD339) polypeptide, an ICAM (CD540 polypeptide, a PD-L1 polypeptide, a FasL polypeptide, a PD-L2 polypeptide, a PD-1H (VISTA) polypeptide, an ICOS-L (CD275) polypeptide, a GITRL polypeptide, an HVEM polypeptide, a CXCL10 polypeptide, a CXCL9 polypeptide, a CXCL11 polypeptide, a CXCL13 polypeptide, and a CX3CL1 polypeptide, a Galectin-9 polypeptide, a CD83 polypeptide, a CD30L polypeptide, a HLA-G polypeptide, a MICA polypeptide, a MICB polypeptide, a HVEM (CD270) polypeptide, a lymphotoxin beta receptor polypeptide, a 3/TR6 polypeptide, an ILT3 polypeptide, an ILT4 polypeptide, a CXCL10 polypeptide, a CXCL9 polypeptide, a CXCL11 polypeptide, a CXCL13 polypeptide, or a CX3CL1 polypeptide. These immunomodulatory polypeptides may be the wild type polypeptide or a variant of a wild type polypeptide. In some cases, the immunomodulatory polypeptide is an activating (“stimulatory”) immunomodulatory polypeptide; e.g., the immunomodulatory polypeptide may produce an activating/stimulating effect on a T cell. Examples of activating immunomodulatory polypeptides include, e.g., CD80, CD86, 4-1BBL, OX40L, CD70, ICOS-L, CD40, ICAM (CD54), IL2, IL7, IL12, IL15, IL17, IL21, IL27, IL23, GITRL, TGFβ, and lymphotoxin beta receptor. In some cases, the immunomodulatory polypeptide is an inhibitory (“suppressing”) immunomodulatory polypeptide; e.g., the immunomodulatory polypeptide s may produce a suppressing/inhibitory effect on a T cell. Examples of inhibitory immunomodulatory polypeptides include, e.g., PD-1H, PD-L1, PD-L2, TGFβ, FasL, HVEM, Galectin-9, ILT3, and ILT4. TGFβ polypeptides may produce either an activating/stimulating effect or a suppressing/inhibitory effect, depending on the context. In some cases, the at least one immunomodulatory polypeptide is a reduced affinity variant, as described elsewhere herein. In some cases, the first or the second polypeptide comprises an Ig Fc polypeptide.

[0154] In some cases, a multiple disulfide-linked TMMP of the present disclosure (e.g., a double disulfide-linked TMMP) comprises an HLA-A Class I heavy chain polypeptide. In some cases, the HLA-A heavy chain polypeptide present in a multiple disulfide-linked TMMP of the present disclosure (e.g., a double disulfide-linked TMMP) comprises an amino acid sequence having at least 95%, at least 98%, or at least 99%, amino acid sequence identity to the HLA-A*0101, HLA-A*0201, HLA-A*0202, HLA-A*1101, HLA-A*2301, HLA-A*2402, HLA-A*2407, HLA-A*3303, or HLA-A*3401 amino acid sequence depicted in FIG. 11A, where the HLA-A heavy chain polypeptide comprises Y84C and A236C substitutions.

### HLA-A*0101 (Y84C; A236C)

[0155] In some cases, the HLA-A heavy chain polypeptide present in a multiple disulfide-linked TMMP of the present disclosure (e.g., a double disulfide-linked TMMP) comprises an amino acid sequence having at least 95%, at least 98%, at least 99%, or 100%, amino acid sequence identity to the following HLA-A*0101 (Y84C; A236C) amino acid sequence:

(SEQ ID NO: 343)
GSHSMRYFFTSVSRPGRGEPRFIAVGYVDDTQFVRFDSDAASQKMEPRA
PWIEQEGPEYWDQETRNMKAHSQTDRANLGTLRGCYNQSEDGSHTIQIM
YGCDVGPDGRFLRGYRQDAYDGKDYIALNEDLRSWTAADMAAQITKRKW
EAVHAAEQRRVYLEGRCVDGLRRYLENGKETLQRTDPPKTHMTHHPISD
HEATLRCWALGFYPAEITETWQRDGEDQTQDTELVETRPCGDGTFQKWA
AVVVPSGEEQRYTCHVQHEGLPKPLTLRWE,

where amino acid 84 is a Cys and amino acid 236 is a Cys.

### HLA-A*0201 (Y84C; A236C)

[0156] In some cases, the HLA-A heavy chain polypeptide present in a multiple disulfide-linked TMMP of the present disclosure (e.g., a double disulfide-linked TMMP) comprises an amino acid sequence having at least 95%, at least 98%, at least 99%, or 100%, amino acid sequence identity to the following HLA-A*0201 (Y84C; A236C) amino acid sequence:

(SEQ ID NO: 341)
GSHSMRYFFTSVSRPGRGEPRFIAVGYVDDTQFVRFDSDAASQRMEPRA
PWIEQEGPEYWDGETRKVKAHSQTHRVDLGTLRGCYNQSEAGSHTVQRM
YGCDVGSDWRFLRGYHQYAYDGKDYIALKEDLRSWTAADMAAQTTKHKW
EAAHVAEQLRAYLEGTCVEWLRRYLENGKETLQRTDAPKTHMTHHAVSD
HEATLRCWALSFYPAEITLTWQRDGEDQTQDTELVETRPCGDGTFQKWA
AVVVPSGQEQRYTCHVQHEGLPKPLTLRWEP,

where amino acid 84 is a Cys and amino acid 236 is a Cys.

### HLA-A*0202 (Y84C; A236C)

[0157] In some cases, the HLA-A heavy chain polypeptide present in a multiple disulfide-linked TMMP of the present disclosure (e.g., a double disulfide-linked TMMP) comprises an amino acid sequence having at least 95%, at least 98%, at least 99%, or 100%, amino acid sequence identity to the following HLA-A*0202 (Y84C; A236C) amino acid sequence:

(SEQ ID NO: 341)
GSHSMRYFFTSVSRPGRGEPRFIAVGYVDDTQFVRFDSDAASQRMEPRA
PWIEQEGPEYWDGETRKVKAHSQTHRVDLGTLRGCYNQSEAGSHTVQRM
YGCDVGSDWRFLRGYHQYAYDGKDYIALKEDLRSWTAADMAAQTTKHKW
EAAHVAEQLRAYLEGTCVEWLRRYLENGKETLQRTDAPKTHMTHHAVSD
HEATLRCWALSFYPAEITLTWQRDGEDQTQDTELVETRPCGDGTFQKWA
AVVVPSGQEQRYTCHVQHEGLPKPLTLRWEP,

where amino acid 84 is a Cys and amino acid 236 is a Cys.

### HLA-A*1101 (Y84C; A236C)

[0158] In some cases, the HLA-A heavy chain polypeptide present in a multiple disulfide-linked TMMP of the present disclosure (e.g., a double disulfide-linked TMMP) comprises an amino acid sequence having at least 95%, at least 98%, at least 99%, or 100%, amino acid sequence identity to the following HLA-A*1101 (Y84C; A236C) amino acid sequence:

(SEQ ID NO: 344)
GSHSMRYFYTSVSRPGRGEPRFIAVGYVDDTQFVRFDSDAASQRMEPRA
PWIEQEGPEYWDQETRNVKAQSQTDRVDLGTLRGCYNQSEDGSHTIQIM
YGCDVGPDGRFLRGYRQDAYDGKDYIALNEDLRSWTAADMAAQITKRKW
EAAHAAEQQRAYLEGRCVEWLRRYLENGKETLQRTDPPKTHMTHHPISD
HEATLRCWALGFYPAEITLTWQRDGEDQTQDTELVETRPCGDGTFQKWA
AVVVPSGQEEQRYTCHVQHEGLPKPLTLRWE,

where amino acid 84 is a Cys and amino acid 236 is a Cys.

### HLA-A*2301 (Y84C; A236C)

[0159] In some cases, the HLA-A heavy chain polypeptide present in a multiple disulfide-linked TMMP of the present disclosure (e.g., a double disulfide-linked TMMP) comprises an amino acid sequence having at least 95%, at least 98%, at least 99%, or 100%, amino acid sequence identity to the following HLA-A*2301 (Y84C; A236C) amino acid sequence:

(SEQ ID NO: 345)
GSHSMRYFSTSVSRPGRGEPRFIAVGYVDDTQFVRFDSDAASQRMEPRA
PWIEQEGPEYWDEETGKVKAHSQTDRENLRIALRCYNQSEAGSHTLQMM
FGCDVGSDGRFLRGYHQYAYDGKDYIALKEDLRSWTAADMAAQITQRKW
EAARVAEQLRAYLEGTCVDGLRRYLENGKETLQRTDPPKTHMTHHPISD
HEATLRVWALGFYPAEITLTWQRDGEDQTQDTELVETRPCGDGTFQKWA
AVVVPSGEEQRYTCHVQHEGLPKPLTLRE,

where amino acid 84 is a Cys and amino acid 236 is a Cys.

### HLA-A*2402 (Y84C; A236C)

[0160] In some cases, the HLA-A heavy chain polypeptide present in a multiple disulfide-linked TMMP of the present disclosure (e.g., a double disulfide-linked TMMP) comprises an amino acid sequence having at least 95%, at least 98%, at least 99%, or 100%, amino acid sequence identity to the following HLA-A*2402 (Y84C; A236C) amino acid sequence:

(SEQ ID NO: 346)
GSHSMRYFSTSVSRPGRGEPRFIAVGYVDDTQFVRFDSDAASQRMEPRA
PWIEQEGPEYWDEETGKVKAHSQTDRENLRIALRCYNQSEAGSHTLQMM
FGCDVGSDGRFLRGYHQYAYDGKDYIALKEDLRSWTAADMAAQITKRKW
EAAHVAEQQRAYLEGTCVDGLRRYLENGKETLQRTDPPKTHMTHHPISD
HEATLRCWALGFYPAEITLWQRDGEDQTQDTELVETRPCGDGTFQKWAA
VVVPSGEEQRYTCHVQHEGLPKPLTLRWE,

where amino acid 84 is a Cys and amino acid 236 is a Cys.

### HLA-A*2407 (Y84C; A236C)

[0161] In some cases, the HLA-A heavy chain polypeptide present in a multiple disulfide-linked TMMP of the present disclosure (e.g., a double disulfide-linked TMMP) comprises an amino acid sequence having at least 95%, at least 98%, at least 99%, or 100%, amino acid sequence identity to the following HLA-A*2407 (Y84C; A236C) amino acid sequence:

(SEQ ID NO: 347)
GSHSMRYFSTSVSRPGRGEPRFIAVGYVDDTQFVRFDSDAASQRMEPRA
PWIEQEGPEYWDEETGKVKAQSQTDRENLRIALRCYNQSEAGSHTLQMM
FGCDVGSDGRFLRGYHQYAYDGKDYIALKEDLRSWTAADMAAQITKRKW
EAAHVAEQQRAYLEGTCVDGLRRYLENGKETLQRTDPPKTHMTHHPISD
HEATLRCWALGFYPAEITLTWQRDGEDQTQDTELVETRPCGDGTFQKWA
AVVVPSGEEQRYTCHVQHEGLPKPLTLRWE,

where amino acid 84 is a Cys and amino acid 236 is a Cys.

### HLA-A*3303 (Y84C; A236C)

[0162] In some cases, the HLA-A heavy chain polypeptide present in a multiple disulfide-linked TMMP of the present disclosure (e.g., a double disulfide-linked TMMP) comprises an amino acid sequence having at least 95%, at least 98%, at least 99%, or 100%, amino acid sequence identity to the following HLA-A*3303 (Y84C; A236C) amino acid sequence:

(SEQ ID NO: 348)
GSHSMRYFTTSVSRPGRGEPRFIAVGYVDDTQFVRFDSDAASQRMEPRA
PWIEQEGPEYWDRNTRNVKAHSQIDRVDLGTLRGCYNQSEAGSHTIQMM
YGCDVGSDGRFLRGYQQDAYDGKDYIALNEDLRSWTAADMAAQITQRKW
EAARVAEQLRAYLEGTCVEWLRRYLENGKETLQRTDPPKTHMTHHAVSD
HEATLRCWALSFYPAEITLTWQRDGEDQTQDTELVETRPCGDGTFQKWA
SVVVPSGQEQRYTCHVQHEGLPKPLTLRWE,

where amino acid 84 is a Cys and amino acid 236 is a Cys.

### HLA-A*3401 (Y84C; A236C)

[0163] In some cases, the HLA-A heavy chain polypeptide present in a multiple disulfide-linked TMMP of the present disclosure (e.g., a double disulfide-linked TMMP) comprises an amino acid sequence having at least 95%, at least 98%, at least 99%, or 100%, amino acid sequence identity to the following HLA-A*3401 (Y84C; A236C) amino acid sequence:

(SEQ ID NO: 349)
GSHSMRYFYTSVSRPGRGEPRFIAVGYVDDTQFVRFDSDAASQRMEPRA
PWIEQEGPEYWDRNTRKVKAQSQTDRVDLGTLRGCYNQSEDGSHTIQRM
YGCDVGPDGRFLRGYQQDAYDGKDYIALNEDLRSWTAADMAAQITQRKW
ETAHEAEQWRAYLEGTCVEWLRRYLENGKETLQRTDAPKTHMTHHAVSD
HEATLRSWALSFYPAEITLTWQRDGEDQTQDTELVETRPCGDGTFQKWA
SVVVPSGQEQRYTCHVQHEGLPKPLTLRWE,

where amino acid 84 is a Cys and amino acid 236 is a Cys.

### HLA-B

[0164] In some cases, a multiple disulfide-linked TMMP of the present disclosure (e.g., a double disulfide-linked TMMP) comprises: a) a first polypeptide comprising: i) an AFP peptide (e.g., an AFP peptide of from 4 amino acids to about 25 amino acids); and ii) a first MHC polypeptide, where the first polypeptide comprises a peptide linker between the AFP peptide and the first MHC polypeptide, where the peptide linker comprises a Cys residue, and where the first MHC polypeptide is a β2M polypeptide that comprises an amino acid substitution that introduces a Cys residue; and b) a second polypeptide comprising an HLA-B MHC Class I heavy chain comprising an amino acid sequence having at least 60%, at least 70%, at least 80%, at least 90%, at least 95%, at least 98%, at least 99%, or 100%, amino acid sequence identity to the following amino acid sequence:

(SEQ ID NO: 350)
GSHSMRYFYTSVSRPGRGEPRFISVGYVDDTQFVRFDSDAASPREEPRA
PWIEQEGPEYWDRNTQIYKAQAQTDRESLRNLRGCYNQSEAGSHTLQSM
YGCDVGPDGRLLRGHDQYAYDGKDYIALNEDLRSWTAADTAAQITQRKW
EAAREAEQRRAYLEGECVEWLRRYLENGKDKLERADPPKTHVTHHPISD
HEATLRCWALGFYPAEITLTWQRDGEDQTQDTELVETRPCGDRTFQKWA
AVVVPSGEEQRYTCHVQHEGLPKPLTLRWEP,

where amino acid 84 is a Cys and amino acid 236 is a Cys; and c) at least one immunomodulatory polypeptide, where the first and/or the second polypeptide comprises the at least one immunomodulatory polypeptide. In some cases, the peptide linker comprises the amino acid sequence GCGGS (SEQ ID NO:318). In some cases, the peptide linker comprises the amino acid sequence GCGGS(GGGGS)n (SEQ ID NO:342), where n is an integer from 1 to 10. In some cases, the β2M polypeptide comprises an R12C substitution. For example, the β2M polypeptide can comprises an amino acid sequence having at least 90%, at least 95%, at least 98%, at least 99%, or 100%, amino acid sequence identity to the following amino acid sequence:

(SEQ ID NO:314)
IQRTPKIQVYSCHPAENGKSNFLNCYVSGFHPSDIEVDLLKNGERIEKV
EHSDLSFSKDWSFYLLYYTEFTPTEKDEYACRVNHVTLSQPKIVKWDRD
M,

where amino acid 12 is a Cys. The at least one immunomodulatory polypeptide can be a polypeptide that exerts an activating/stimulating effect on the target T cell or a suppressing/inhibitory effect on the target T cell. For example, the at least one immunomodulatory polypeptide can be a cytokine (e.g., an IL2 polypeptide, an IL7 polypeptide, an IL12 polypeptide, an IL15 polypeptide, an IL17 polypeptide, an IL21 polypeptide, an IL27 polypeptide, an IL-23 polypeptide, a TGFβ polypeptide, and the like; and including all family members, e.g., IL17A, IL-17B, IL-17C, IL-17D, IL-17E, IL-17F, IL-17E), a 4-1BBL polypeptide, an ICOS-L polypeptide, an OX-40L polypeptide, a CD80 polypeptide, a CD86 polypeptide, (CD80 and CD86 are also known as B7-1 and B7.2, respectively), a CD40 polypeptide, a CD70 polypeptide, a JAG1 (CD339) polypeptide, an ICAM (CD540 polypeptide, a PD-L1 polypeptide, a FasL polypeptide, a PD-L2 polypeptide, a PD-1H (VISTA) polypeptide, ICOS-L (CD275) polypeptide, a GITRL polypeptide, an HVEM polypeptide, a CXCL10 polypeptide, a CXCL9 polypeptide, a CXCL11 polypeptide, a CXCL13 polypeptide, and a CX3CL1 polypeptide, a Galectin-9 polypeptide, a CD83 polypeptide, a CD30L polypeptide, a HLA-G polypeptide, a MICA polypeptide, a MICB polypeptide, a HVEM (CD270) polypeptide, a lymphotoxin beta receptor polypeptide, a 3/TR6 polypeptide, an ILT3 polypeptide, an ILT4 polypeptide, a CXCL10 polypeptide, a CXCL9 polypeptide, a CXCL11 polypeptide, a CXCL13 polypeptide, or a CX3CL1 polypeptide. These immunomodulatory polypeptides may be the wild type polypeptide or a variant of a wild type polypeptide. In some cases, the immunomodulatory polypeptide is an activating (“stimulatory”) immunomodulatory polypeptide; e.g., the immunomodulatory polypeptide may produce an activating/stimulating effect on a T cell. Examples of activating immunomodulatory polypeptides include, e.g., CD80, CD86, 4-1BBL, OX40L, CD70, ICOS-L, CD40, ICAM (CD54), IL2, IL7, IL12, IL15, IL17, IL21, IL27, IL23, GITRL, TGFβ, and lymphotoxin beta receptor. In some cases, the immunomodulatory polypeptide is an inhibitory (“suppressing”) immunomodulatory polypeptide; e.g., the immunomodulatory polypeptide s may produce a suppressing/inhibitory effect on a T cell. Examples of inhibitory immunomodulatory polypeptides include, e.g., PD-1H, PD-L1, PD-L2, TGFβ, FasL, HVEM, Galectin-9, ILT3, and ILT4. TGFβ polypeptides may produce either an activating/stimulating effect or a suppressing/inhibitory effect, depending on the context. In some cases, the at least one immunomodulatory polypeptide is a reduced affinity variant, as described elsewhere herein. In some cases, the first or the second polypeptide comprises an Ig Fc polypeptide.

[0165] In some cases, a multiple disulfide-linked TMMP of the present disclosure comprises an HLA-B Class I heavy chain polypeptide. In some cases, the HLA-B heavy chain polypeptide present in a multiple disulfide-linked TMMP of the present disclosure (e.g., a double disulfide-linked TMMP) comprises an amino acid sequence having at least 95%, at least 98%, or at least 99%, amino acid sequence identity to the HLA-B*0702, HLA-B*0801, HLA-B*1502, HLA-B*3802, HLA-B*4001, HLA-B*4601, or HLA-B*5301 amino acid sequence depicted in FIG. 12A, where the HLA-B heavy chain polypeptide comprises Y84C and A236C substitutions.

### HLA-B*0702 (Y84C; A236C)

[0166] In some cases, the HLA-B heavy chain polypeptide present in a multiple disulfide-linked TMMP of the present disclosure (e.g., a double disulfide-linked TMMP) comprises an amino acid sequence having at least 95%, at least 98%, at least 99%, or 100%, amino acid sequence identity to the following HLA-B*0702 (Y84C; A236C) amino acid sequence:

(SEQ ID NO: 350)
GSHSMRYFYTSVSRPGRGEPRFISVGYVDDTQFVRFDSDAASPREEPRA
PWIEQEGPEYWDRNTQIYKAQAQTDRESLRNLRGCYNQSEAGSHTLQSM
YGCDVGPDGRLLRGHDQYAYDGKDYIALNEDLRSWTAADTAAQITQRKW
EAAREAEQRRAYLEGECVEWLRRYLENGKDKLERADPPKTHVTHHPISD
HEATLRCWALGFYPAEITLTWQRDGEDQTQDTELVETRPCGDRTFQKWA
AVVVPSGEEQRYTCHVQHEGLPKPLTLRWE,

where amino acid 84 is a Cys and amino acid 236 is a Cys.

### HLA-B*0801 (Y84C; A236C)

[0167] In some cases, the HLA-B heavy chain polypeptide present in a multiple disulfide-linked TMMP of the present disclosure (e.g., a double disulfide-linked TMMP) comprises an amino acid sequence having at least 95%, at least 98%, at least 99%, or 100%, amino acid sequence identity to the following HLA-B*0801 (Y84C; A236C) amino acid sequence:

(SEQ ID NO: 351)
GSHSMRYFDTAMSRPGRGEPRFISVGYVDDTQFVRFDSDAASPREEPRA
PWIEQEGPEYWDRNTQIFKTNTQTDRESLRNLRGCYNQSEAGSHTLQSM
YGCDVGPDGRLLRGHNQYAYDGKDYIALNEDLRSWTAADTAAQITQRKW
EAARVAEQDRAYLEGTCVEWLRRYLENGKDTLERADPPKTHVTHHPISD
HEATLRCWALGFYPAIITLTWQRDGEDQTQDTELVETRPCGDRTFQKWA
AVVVPSGEEQRYTCHVQHEGLPKPLTLRWE,

where amino acid 84 is a Cys and amino acid 236 is a Cys.

### HLA-B*1502 (Y84C; A236C)

[0168] In some cases, the HLA-B heavy chain polypeptide present in a multiple disulfide-linked TMMP of the present disclosure (e.g., a double disulfide-linked TMMP) comprises an amino acid sequence having at least 95%, at least 98%, at least 99%, or 100%, amino acid sequence identity to the following HLA-B*1502 (Y84C; A236C) amino acid sequence:

(SEQ ID NO: 352)
GSHSMRYFTAMSRPGRGEPRFIAVGYVDDTTQFVRFDSDAASPRMAPRA
PWIEQEGPEYWDRNTQISKTNTQTYRESLRNLRGCYNQSEAGSHIIQRM
YGCDVGPDGRLLRGYDQSAYDGKDYIALNEDLSSWTAADTAAQITQRKW
EAAREAEQLRAYLEGLCVEWLRRYLENGKETLQRADPPKTHVTHHPISD
HEATLRCWALGFYPAEITLTWQRDGEDQTQDTELVETRPCGDRTFQKWA
AVVVPSGEEQRYTCHVQHEGLPKPLTLRWE,

where amino acid 84 is a Cys and amino acid 236 is a Cys.

### HLA-B*3802 (Y84C; A236C)

[0169] In some cases, the HLA-B heavy chain polypeptide present in a multiple disulfide-linked TMMP of the present disclosure (e.g., a double disulfide-linked TMMP) comprises an amino acid sequence having at least 95%, at least 98%, at least 99%, or 100%, amino acid sequence identity to the following HLA-B*3802 (Y84C; A236C) amino acid sequence:

(SEQ ID NO: 353)
GSHSMRYFYTSVSRPGRGEPRFISVGYVDDTQFVRFDSDAASPREEPRA
PWIEQEGPEYWDRNTQICKTNTQTYRENLRTALRCYNQSEAGSHTLQRM
YGCDVGPDGRLLRGHNQFAYDGKDYIALNEDLSSWTAADTAAQITQRKW
EAARVAEQLRTYLEGTCVEWLRRYLENGKETLQRADPPKTHVTHHPISD
HEATLRCWALGFYPAEITLTWQRDGEDQTQDTELVETRPCGDRTFQKWA
AVVVPSGEEQRYTCHVQHEGLPKPLTLRWE,

where amino acid 84 is a Cys and amino acid 236 is a Cys.

### HLA-B*4001 (Y84C; A2346C)

[0170] In some cases, the HLA-B heavy chain polypeptide present in a multiple disulfide-linked TMMP of the present disclosure (e.g., a double disulfide-linked TMMP) comprises an amino acid sequence having at least 95%, at least 98%, at least 99%, or 100%, amino acid sequence identity to the following HLA-B*4001 (Y84C; A236C) amino acid sequence:

(SEQ ID NO: 354)
GSHSMRYFHTAMSRPGRGEPRFITVGYVDDTLFVRFDSDATSPRKEPRA
PWIEQEGPEYWDRETQISKTNTQTYRESLRNLRGCYNQSEAGSHTLQRM
YGCDVGPDGRLLRGHNQYAYDGKDYIALNEDLRSWTAADTAAQISQRKL
EAARVAEQLRAYLEGECVEWLRRYLENGKDKLERADPPKTHVTHHPISD
HEATLRCWALGFYPAEITLTWQRDGEDQTQDTELVETRPCGDRTFQKWA
AVVVPSGEEQRYTCHVQHEGLPKPLTLRWE

where amino acid 84 is a Cys and amino acid 236 is a Cys.

### HLA-B*4601 (Y84C; A236C)

[0171] In some cases, the HLA-B heavy chain polypeptide present in a multiple disulfide-linked TMMP of the present disclosure (e.g., a double disulfide-linked TMMP) comprises an amino acid sequence having at least 95%, at least 98%, at least 99%, or 100%, amino acid sequence identity to the following HLA-B*4601 (Y84C; A236C) amino acid sequence:

(SEQ ID NO:355)
GSHSMRYFYTAMSRPGRGEPRFIAVGYVDDTQFVRFDSDAASPRMAPRA
PWIEQEGPEYWDRETQKYKRQAQTDRVSLRNLRGCYNQSEAGSHTLQRM
YCDVGPDGRLLRGHDQSAYDGKDYIALNEDLSSWTAADTAAQITQRKWE
AAREAEQWRAYLEGLCVEWLRRYLENGKETLQRADPPKTHVTHHPISDH
EATLRCWALGFYPAEITLTWQRDGEDQTQDTELVETRPCGDRTFQKWAA
VVVPSGEEQRYTCHVQHEGLPKPLTLRWE

where amino acid 84 is a Cys and amino acid 236 is a Cys.

### HLA-B*5301 (Y84C; A236C)

[0172] In some cases, the HLA-B heavy chain polypeptide present in a multiple disulfide-linked TMMP of the present disclosure (e.g., a double disulfide-linked TMMP) comprises an amino acid sequence having at least 95%, at least 98%, at least 99%, or 100%, amino acid sequence identity to the following HLA-B*5301 (Y84C; A236C) amino acid sequence:

(SEQ ID NO:356)
GSHSMRYFYTAMSRPGRGEPRFIAVGYVDDTQFVRFDSDAASPRTEPRA
PWIEQEGPEYWDRNTQIFKTNTQTYRENLRIALRCYNQSEAGSHIIQRM
YGCDLGPDGRLLRGHDQSAYDGKDYIALNEDLSSWTAADTAAQITQRKW
EAARVAEQLRAYLEGLCVEWLRRYLENGKETLQRADPPKTHVTHHPVSD
HEATLRCWALGFYPAEITLTWQRDGEDQTQDTELVETRPCGDRTFQKWA
AVVVPSGEEQRYTCHVQHEGLPKPLTLRWE

where amino acid 84 is a Cys and amino acid 236 is a Cys.

### HLA-C

[0173] In some cases, a multiple disulfide-linked TMMP of the present disclosure (e.g., a double disulfide-linked TMMP) comprises: a) a first polypeptide comprising: i) an AFP peptide (e.g., an AFP peptide of from 4 amino acids to about 25 amino acids); and ii) a first MHC polypeptide, where the first polypeptide comprises a peptide linker between the AFP peptide and the first MHC polypeptide, where the peptide linker comprises a Cys residue, and where the first MHC polypeptide is a β2M polypeptide that comprises an amino acid substitution that introduces a Cys residue; and b) a second polypeptide comprising an HLA-C MHC Class I heavy chain comprising an amino acid sequence having at least 60%, at least 70%, at least 80%, at least 90%, at least 95%, at least 98%, at least 99%, or 100%, amino acid sequence identity to the following amino acid sequence:

(SEQ ID NO:357)
CSHSMRYFDTAVSRPGRGEPRFISVGYVDDTQFVRFDSDAASPRGEPRA
PWVEQEGPEYWDRETQNYKRQAQADRVSLRNLRGCYNQSEDGSHTLQRM
YGCDLGPDGRLLRGYDQSAYDGKDYIALNEDLRSWTAADTAAQITQRKL
EAARAAEQLRAYLEGTCVEWLRRYLENGKETLQRAEPPKTHVTHHPLSD
HEATLRCWALGFYPAEITLTWQRDGEDQTQDTELVETRPCGDGTFQKWA
AVVVPSGQEQRYTCHMQHEGLQEPLTLSWEP,

where amino acid 84 is a Cys and amino acid 236 is a Cys; and c) at least one immunomodulatory polypeptide, where the first and/or the second polypeptide comprises the at least one immunomodulatory polypeptide. In some cases, the peptide linker comprises the amino acid sequence GCGGS (SEQ ID NO:318). In some cases, the peptide linker comprises the amino acid sequence GCGGS(GGGGS)n (SEQ ID NO: 342), where n is an integer from 1 to 10. In some cases, the β2M polypeptide comprises an R12C substitution. For example, the β2M polypeptide can comprises an amino acid sequence having at least 90%, at least 95%, at least 98%, at least 99%, or 100%, amino acid sequence identity to the following amino acid sequence:

(SEQ ID NO:314)
IQRTPKIQVYSCHPAENGKSNFLNCYVSGFHPSDIEVDLLKNGERIEKV
EHSDLSFSKDWSFYLLYYTEFTPTEKDEYACRVNHVTLSQPKIVKWDRD
M,

where amino acid 12 is a Cys. The at least one immunomodulatory polypeptide can be a polypeptide that exerts an activating/stimulating effect on the target T cell or a suppressing/inhibitory effect on the target T cell. For example, the at least one immunomodulatory polypeptide can be a cytokine (e.g., an IL2 polypeptide, an IL7 polypeptide, an IL12 polypeptide, an IL15 polypeptide, an IL17 polypeptide, an IL21 polypeptide, an IL27 polypeptide, an IL-23 polypeptide, a TGFβ polypeptide, and the like; and including all family members, e.g., IL17A, IL-17B, IL-17C, IL-17D, IL-17E, IL-17F, IL-17E), a 4-1BBL polypeptide, an ICOS-L polypeptide, an OX-40L polypeptide, a CD80 polypeptide, a CD86 polypeptide, (CD80 and CD86 are also known as B7-1 and B7-2, respectively), a CD40 polypeptide, a CD70 polypeptide, a JAG1 (CD339) polypeptide, an ICAM (CD540 polypeptide, a PD-L1 polypeptide, a FasL polypeptide, a PD-L2 polypeptide, a PD-1H (VISTA) polypeptide, an ICOS-L (CD275) polypeptide, a GITRL polypeptide, an HVEM polypeptide, a CXCL10 polypeptide, a CXCL9 polypeptide, a CXCL11 polypeptide, a CXCL13 polypeptide, and a CX3CL1 polypeptide, a Galectin-9 polypeptide, a CD83 polypeptide, a CD30L polypeptide, a HLA-G polypeptide, a MICA polypeptide, a MICB polypeptide, a HVEM (CD270) polypeptide, a lymphotoxin beta receptor polypeptide, a 3/TR6 polypeptide, an ILT3 polypeptide, an ILT4 polypeptide, a CXCL10 polypeptide, a CXCL9 polypeptide, a CXCL11 polypeptide, a CXCL13 polypeptide, or a CX3CL1 polypeptide. These immunomodulatory polypeptides may be the wild type polypeptide or a variant of a wild type polypeptide. In some cases, the immunomodulatory polypeptide is an activating (“stimulatory”) immunomodulatory polypeptide; e.g., the immunomodulatory polypeptide may produce an activating/stimulating effect on a T cell. Examples of activating immunomodulatory polypeptides include, e.g., CD80, CD86, 4-1BBL, OX40L, CD70, ICOS-L, CD40, ICAM (CD54), IL2, IL7, IL12, IL15, IL17, IL21, IL27, IL23, GITRL, TGFβ, and lymphotoxin beta receptor. In some cases, the immunomodulatory polypeptide is an inhibitory (“suppressing”) immunomodulatory polypeptide; e.g., the immunomodulatory polypeptide s may produce a suppressing/inhibitory effect on a T cell. Examples of inhibitory immunomodulatory polypeptides include, e.g., PD-1H, PD-L1, PD-L2, TGFβ, HVEM, Galectin-9, ILT3, and ILT4. TGFβ polypeptides may produce either an activating/stimulating effect or a suppressing/inhibitory effect, depending on the context. In some cases, the at least one immunomodulatory polypeptide is a reduced affinity variant, as described elsewhere herein. In some cases, the first or the second polypeptide comprises an Ig Fc polypeptide.

[0174] In some cases, a multiple disulfide-linked TMMP of the present disclosure (e.g., a double disulfide-linked TMMP) comprises an HLA-C Class I heavy chain polypeptide. In some cases, the HLA-C heavy chain polypeptide present in a multiple disulfide-linked TMMP of the present disclosure (e.g., a double disulfide-linked TMMP) comprises an amino acid sequence having at least 95%, at least 98%, or at least 99%, amino acid sequence identity to the HLA-C*0102, HLA-C*0303, HLA-C*0304, HLA-C*0401, HLA-C*0602, HLA-C*0701, HLA-C*0702, HLA-C*0801, or HLA-C*1502 amino acid sequence depicted in FIG. 13A, where the HLA-C heavy chain polypeptide comprises Y84C and A236C substitutions.

### HLA-C*01:02 (Y84C; A236C)

[0175] In some cases, the HLA-C heavy chain polypeptide present in a multiple disulfide-linked TMMP of the present disclosure (e.g., a double disulfide-linked TMMP) comprises an amino acid sequence having at least 95%, at least 98%, at least 99%, or 100%, amino acid sequence identity to the following HLA-C*01:02 (Y84C; A236C) amino acid sequence:

(SEQ ID NO:358)
CSHSMKYFFTSVSRPGRGEPRFISVGYVDDTQFVRFDSDAASPRGEPRA
PWVEQEGPEYWDRETQKYKRQAQTDRVSLRNLRGCYNQSEAGSHTLQWM
CGCDLGPDGRLLRGYDQYAYDGKDYIALNEDLRSWTAADTAAQITQRKW
EAAREAEQRRAYLEGTCVEWLRRYLENGKETLQRAEHPKTHVTHHPVSD
HEATLRCWALGFYPAEITLTWQWDGEDQTQDTELVETRPCGDGTFQKWA
AVMVPSGEEQRYTCHVQHEGLPEPLTLRWEP,

where amino acid 84 is a Cys and amino acid 236 is a Cys.

### HLA-C*0303 (Y84C; A236C)

[0176] In some cases, the HLA-C heavy chain polypeptide present in a multiple disulfide-linked TMMP of the present disclosure (e.g., a double disulfide-linked TMMP) comprises an amino acid sequence having at least 95%, at least 98%, at least 99%, or 100%, amino acid sequence identity to the following HLA-C*03:03 (Y84C; A236C) amino acid sequence:

(SEQ ID NO:359)
GSHSMRYFYTAVSRPGRGEPHFIAVGYVDDTQFVRFDSDAASPRGEPRA
PWVEQEGPEYWDRETQKYKRQAQTDRVSLRNLRGCYNQSEARSHIIQRM
YGCDVGPDGRLLRGYDQYAYDGKDYIALNEDLRSWTAADTAAQITQRKW
EAAREAEQLRAYLEGLCVEWLRRYLKNGKETLQRAEHPKTHVTHHPVSD
HEATLRCWALGFYPAEITLTWQWDGEDQTQDTELVETRPCGDGTFQKWA
AVVVPSGEEQRYTCHVQHEGLPEPLTLRWEP,

where amino acid 84 is a Cys and amino acid 236 is a Cys.

### HLA-C*0304 (Y84C; A236C)

[0177] In some cases, the HLA-C heavy chain polypeptide present in a multiple disulfide-linked TMMP of the present disclosure (e.g., a double disulfide-linked TMMP) comprises an amino acid sequence having at least 95%, at least 98%, at least 99%, or 100%, amino acid sequence identity to the following HLA-C*03:04 (Y84C; A236C) amino acid sequence:

(SEQ ID NO:360)
GSHSMRYFYTAVSRPGRGEPHFIAVGYVDDTQFVRFDSDAASPRGEPRA
PWVEQEGPEYWDRETQKYKRQAQTDRVSLRNLRGCYNQSEAGSHIIQRM
YGCDVGPDGRLLRGYDQYAYDGKDYIALNEDLRSWTAADTAAQITQRKW
EAAREAEQLRAYLEGLCVEWLRRYLKNGKETLQRAEHPKTHVTHHPVSD
HEATLRCWALGFYPAEITLTWQWDGEDQTQDTELVETRPCGDGTFQKWA
AVVVPSGEEQRYTCHVQHEGLPEPLTLRWEP,

where amino acid 84 is a Cys and amino acid 236 is a Cys.

### HLA-C*0401 (Y84C; A236C)

[0178] In some cases, the HLA-C heavy chain polypeptide present in a multiple disulfide-linked TMMP of the present disclosure (e.g., a double disulfide-linked TMMP) comprises an amino acid sequence having at least 95%, at least 98%, at least 99%, or 100%, amino acid sequence identity to the following HLA-C*04:01 (Y84C; A236C) amino acid sequence:

(SEQ ID NO:361)
GSHSMRYFSTSVSWPGRGEPRFIAVGYVDDTQFVRFDSDAASPRGEPRE
PWVEQEGPEYWDRETQKYKRQAQADRVNLRKLRGCYNQSEDGSHTLQRM
FGCDLGPDGRLLRGYNQFAYDGKDYIALNEDLRSWTAADTAAQITQRKW
EAAREAEQRRAYLEGTCVEWLRRYLENGKETLQRAEHPKTHVTHHPVSD
HEATLRCWALGFYPAEITLTWQWDGEDQTQDTELVETRPCGDGTFQKWA
AVVVPSGEEQRYTCHVQHEGLPEPLTLRWKP,

where amino acid 84 is a Cys and amino acid 236 is a Cys.

### HLA-C*0602 (Y84C; A236C)

[0179] In some cases, the HLA-C heavy chain polypeptide present in a multiple disulfide-linked TMMP of the present disclosure (e.g., a double disulfide-linked TMMP) comprises an amino acid sequence having at least 95%, at least 98%, at least 99%, or 100%, amino acid sequence identity to the following HLA-C*06:02 (Y84C; A236C) amino acid sequence:

(SEQ ID NO:362)
CSHSMRYFDTAVSRPGRGEPRFISVGYVDDTQFVRFDSDAASPRGEPRA
PWVEQEGPEYWDRETQKYKRQAQADRVNLRKLRGCYNQSEDGSHTLQWM
YGCDLGPDGRLLRGYDQSAYDGKDYIALNEDLRSWTAADTAAQITQRKW
EAAREAEQWRAYLEGTCVEWLRRYLENGKETLQRAEHPKTHVTHHPVSD
HEATLRCWALGFYPAEITLTWQRDGEDQTQDTELVETRPCGDGTFQKWA
AVVVPSGEEQRYTCHVQHEGLPEPLTLRWEP,

where amino acid 84 is a Cys and amino acid 236 is a Cys.

### HLA-C*0701 (Y84C; A236C)

[0180] In some cases, the HLA-C heavy chain polypeptide present in a multiple disulfide-linked TMMP of the present disclosure (e.g., a double disulfide-linked TMMP) comprises an amino acid sequence having at least 95%, at least 98%, at least 99%, or 100%, amino acid sequence identity to the following HLA-C*07:01 (Y84C; A236C) amino acid sequence:

(SEQ ID NO:357)
CSHSMRYFDTAVSRPGRGEPRFISVGYVDDTQFVRFDSDAASPRGEPRA
PWVEQEGPEYWDRETQKYKRQAQADRVSLRNLRGCYNQSEDGSHTLQRM
SGCDLGPDGRLLRGYDQSAYDGKDYIALNEDLRSWTAADTAAQITQRKL
EAARAAEQLRAYLEGTCVEWLRRYLENGKETLQRAEPPKTHVTHHPLSD
HEATLRCWALGFYPAEITLTWQRDGEDQTQDTELVETRPCGDGTFQKWA
AVVVPSGQEQRYTCHMQHEGLQEPLTLSWEP,

where amino acid 84 is a Cys and amino acid 236 is a Cys.

### HLA-C*0702 (Y84C; A236C)

[0181] In some cases, the HLA-C heavy chain polypeptide present in a multiple disulfide-linked TMMP of the present disclosure (e.g., a double disulfide-linked TMMP) comprises an amino acid sequence having at least 95%, at least 98%, at least 99%, or 100%, amino acid sequence identity to the following HLA-C*07:02 (Y84C; A236C) amino acid sequence:

(SEQ ID NO:404)
CSHSMRYFDTAVSRPGRGEPRFISVGYVDDTQFVRFDSDAASPRGEPRA
PWVEQEGPEYWDRETQKYKRQAQADRVSLRNLRGCYNQSEDGSHTLQRM
SGCDLGPDGRLLRGYDQSAYDGKDYIALNEDLRSWTAADTAAQITQRKL
EAARAAEQLRAYLEGTCVEWLRRYLENGKETLQRAEPPKTHVTHHPLSD
HEATLRCWALGFYPAEITLTWQRDGEDQTQDTELVETRPCGDGTFQKWA
AVVVPSGQEQRYTCHMQHEGLQEPLTLSWEP,

where amino acid 84 is a Cys and amino acid 236 is a Cys.

### HLA-C*0801 (Y84C; A236C)

[0182] In some cases, the HLA-C heavy chain polypeptide present in a multiple disulfide-linked TMMP of the present disclosure (e.g., a double disulfide-linked TMMP) comprises an amino acid sequence having at least 95%, at least 98%, at least 99%, or 100%, amino acid sequence identity to the following HLA-C*08:01 (Y84C; A236C) amino acid sequence:

(SEQ ID NO:363)
CSHSMRYFYTAVSRPGRGEPRFIAVGYVDDTQFVQFDSDAASPRGEPRA
PWVEQEGPEYWDRETQKYKRQAQTDRVSLRNLRGCYNQSEAGSHTLQRM
YGCDLGPDGRLLRGYNQFAYDGKDYIALNEDLRSWTAADTAAQITQRKW
EAARTAEQLRAYLEGTCVEWLRRYLENGKKTLQRAEHPKTHVTHHPVSD
HEATLRCWALGFYPAEITLTWQRDGEDQTQDTELVETRPCGDGTFQKWA
AVVVPSGEEQRYTCHVQHEGLPEPLTLRWGP,

where amino acid 84 is a Cys and amino acid 236 is a Cys.

### HLA-C*1502 (Y84C; A236C)

[0183] In some cases, the HLA-C heavy chain polypeptide present in a multiple disulfide-linked TMMP of the present disclosure (e.g., a double disulfide-linked TMMP) comprises an amino acid sequence having at least 95%, at least 98%, at least 99%, or 100%, amino acid sequence identity to the following HLA-C*15:02 (Y84C; A236C) amino acid sequence:

(SEQ ID NO:364)
CSHSMRYFYTAVSRPGRGEPHFIAVGYVDDTQFVRFDSDAASPRGEPRA
PWVEQEGPEYWDRETQNYKRQAQTDRVNLRKLRGCYNQSEAGSHIIQRM
YGCDLGPDGRLLRGHDQLAYDGKDYIALNEDLRSWTAADTAAQITQRKW
EAAREAEQLRAYLEGTCVEWLRRYLENGKETLQRAEHPKTHVTHHPVSD
HEATLRCWALGFYPAEITLTWQRDGEDQTQDTELVETRPCGDGTFQKWA
AVVVPSGEEQRYTCHVQHEGLPEPLTLRWEP,

where amino acid 84 is a Cys and amino acid 236 is a Cys.

### Scaffold Polypeptides

[0184] A TMMP can comprise an Fc polypeptide, or can comprise another suitable scaffold polypeptide.

[0185] Suitable scaffold polypeptides include antibody-based scaffold polypeptides and non-antibody-based scaffolds. Non-antibody-based scaffolds include, e.g., albumin, an XTEN (extended recombinant) polypeptide, transferrin, an Fc receptor polypeptide, an elastin-like polypeptide (see, e.g., Hassouneh et al. (2012) Methods Enzymol. 502:215; e.g., a polypeptide comprising a pentapeptide repeat unit of (Val-Pro-Gly-X-Gly; SEQ ID NO:59), where X is any amino acid other than proline), an albumin-binding polypeptide, a silk-like polypeptide (see, e.g., Valluzzi et al. (2002) Philos Trans R Soc Lond B Biol Sci. 357:165), a silk-elastin-like polypeptide (SELP; see, e.g., Megeed et al. (2002) Adv Drug Deliv Rev. 54:1075), and the like. Suitable XTEN polypeptides include, e.g., those disclosed in WO 2009/023270, WO 2010/091122, WO 2007/103515, US 2010/0189682, and US 2009/0092582; see also Schellenberger et al. (2009) Nat Biotechnol. 27:1186). Suitable albumin polypeptides include, e.g., human serum albumin.

[0186] Suitable scaffold polypeptides will in some cases be a half-life extending polypeptides. Thus, in some cases, a suitable scaffold polypeptide increases the in vivo half-life (e.g., the serum half-life) of the TMMP, compared to a control TMMP lacking the scaffold polypeptide. For example, in some cases, a scaffold polypeptide increases the in vivo half-life (e.g., the serum half-life) of the TMMP, compared to a control TMMP lacking the scaffold polypeptide, by at least about 10%, at least about 15%, at least about 20%, at least about 25%, at least about 50%, at least about 2-fold, at least about 2.5-fold, at least about 5-fold, at least about 10-fold, at least about 25-fold, at least about 50-fold, at least about 100-fold, or more than 100-fold. As an example, in some cases, an Fc polypeptide increases the in vivo half-life (e.g., the serum half-life) of the TMMP, compared to a control TMMP lacking the Fc polypeptide, by at least about 10%, at least about 15%, at least about 20%, at least about 25%, at least about 50%, at least about 2-fold, at least about 2.5-fold, at least about 5-fold, at least about 10-fold, at least about 25-fold, at least about 50-fold, at least about 100-fold, or more than 100-fold.

### Fc Polypeptides

[0187] In some cases, the first and/or the second polypeptide chain of a TMMP of the present disclosure comprises an Fc polypeptide. The Fc polypeptide of a TMMP of the present disclosure can be a human IgG1 Fc, a human IgG2 Fc, a human IgG3 Fc, a human IgG4 Fc, etc. In some cases, the Fc polypeptide comprises an amino acid sequence having at least about 70%, at least about 75%, at least about 80%, at least about 85%, at least about 90%, at least about 95%, at least about 98%, at least about 99%, or 100%, amino acid sequence identity to an amino acid sequence of an Fc region depicted in FIG. 5A-5G. In some cases, the Fc region comprises an amino acid sequence having at least about 70%, at least about 75%, at least about 80%, at least about 85%, at least about 90%, at least about 95%, at least about 98%, at least about 99%, or 100%, amino acid sequence identity to the human IgG1 Fc polypeptide depicted in FIG. 5A. In some cases, the Fc region comprises an amino acid sequence having at least about 70%, at least about 75%, at least about 80%, at least about 85%, at least about 90%, at least about 95%, at least about 98%, at least about 99%, or 100%, amino acid sequence identity to the human IgG1 Fc polypeptide depicted in FIG. 5A; and comprises a substitution of N77; e.g., the Fc polypeptide comprises an N77A substitution. In some cases, the Fc polypeptide comprises an amino acid sequence having at least about 70%, at least about 75%, at least about 80%, at least about 85%, at least about 90%, at least about 95%, at least about 98%, at least about 99%, or 100%, amino acid sequence identity to the human IgG2 Fc polypeptide depicted in FIG. 5A; e.g., the Fc polypeptide comprises an amino acid sequence having at least about 70%, at least about 75%, at least about 80%, at least about 85%, at least about 90%, at least about 95%, at least about 98%, at least about 99%, or 100%, amino acid sequence identity to amino acids 99-325 of the human IgG2 Fc polypeptide depicted in FIG. 5A. In some cases, the Fc polypeptide comprises an amino acid sequence having at least about 70%, at least about 75%, at least about 80%, at least about 85%, at least about 90%, at least about 95%, at least about 98%, at least about 99%, or 100%, amino acid sequence identity to the human IgG3 Fc polypeptide depicted in FIG. 5A; e.g., the Fc polypeptide comprises an amino acid sequence having at least about 70%, at least about 75%, at least about 80%, at least about 85%, at least about 90%, at least about 95%, at least about 98%, at least about 99%, or 100%, amino acid sequence identity to amino acids 19-246 of the human IgG3 Fc polypeptide depicted in FIG. 5A. In some cases, the Fc polypeptide comprises an amino acid sequence having at least about 70%, at least about 75%, at least about 80%, at least about 85%, at least about 90%, at least about 95%, at least about 98%, at least about 99%, or 100%, amino acid sequence identity to the human IgM Fc polypeptide depicted in FIG. 5B; e.g., the Fc polypeptide comprises an amino acid sequence having at least about 70%, at least about 75%, at least about 80%, at least about 85%, at least about 90%, at least about 95%, at least about 98%, at least about 99%, or 100%, amino acid sequence identity to amino acids 1-276 to the human IgM Fc polypeptide depicted in FIG. 5B. In some cases, the Fe polypeptide comprises an amino acid sequence having at least about 70%, at least about 75%, at least about 80%, at least about 85%, at least about 90%, at least about 95%, at least about 98%, at least about 99%, or 100%, amino acid sequence identity to the human IgA Fc polypeptide depicted in FIG. 5C; e.g., the Fc polypeptide comprises an amino acid sequence having at least about 70%, at least about 75%, at least about 80%, at least about 85%, at least about 90%, at least about 95%, at least about 98%, at least about 99%, or 100%, amino acid sequence identity to amino acids 1-234 to the human IgA Fc polypeptide depicted in FIG. 5C.

[0188] In some cases, the Fc polypeptide comprises an amino acid sequence having at least about 70%, at least about 75%, at least about 80%, at least about 85%, at least about 90%, at least about 95%, at least about 98%, at least about 99%, or 100%, amino acid sequence identity to the human IgG4 Fc polypeptide depicted in FIG. 5C. In some cases, the Fc polypeptide comprises an amino acid sequence having at least about 70%, at least about 75%, at least about 80%, at least about 85%, at least about 90%, at least about 95%, at least about 98%, at least about 99%, or 100%, amino acid sequence identity to amino acids 100 to 327 of the human IgG4 Fc polypeptide depicted in FIG. 5C.

[0189] In some cases, the IgG4 Fc polypeptide comprises the following amino acid sequence:

(SEQ ID NO:365)
PPCPSCPAPEFLGGPSVFLFPPKPKDTLMISRTPEVTCVVVDVSQEDPE
VQFNWYVDGVEVHNAKTKPREEQFNSTYRVVSVLTVLHQDWLNGKEYKC
KVSNKGLPSSIEKTISKAKGQPREPQVYTLPPSQEEMTKNQVSLTCLVK
GFYPSDIAVEWESNGQPENNYKTTPPVLDSDGSFFLYSRLTVDKSRWQE
GNVFSCSVMHEALHNHYTQKSLSLSPG.

[0190] In some cases, the Fc polypeptide present in a TMMP comprises the amino acid sequence depicted in FIG. 5A (human IgG1 Fc). In some cases, the Fc polypeptide present in a TMMP comprises the amino acid sequence depicted in FIG. 5A (human IgG1 Fc), except for a substitution of N297 (N77 of the amino acid sequence depicted in FIG. 5A) with an amino acid other than asparagine. In some cases, the Fc polypeptide present in a TMMP comprises the amino acid sequence depicted in FIG. 5C (human IgG1 Fc comprising an N297A substitution, which is N77 of the amino acid sequence depicted in FIG. 5A). In some cases, the Fc polypeptide present in a TMMP comprises the amino acid sequence depicted in FIG. 5A (human IgG1 Fc), except for a substitution of L234 (L14 of the amino acid sequence depicted in FIG. 5A) with an amino acid other than leucine. In some cases, the Fc polypeptide present in a TMMP comprises the amino acid sequence depicted in FIG. 5A (human IgG1 Fc), except for a substitution of L235 (L15 of the amino acid sequence depicted in FIG. 5A) with an amino acid other than leucine.

[0191] In some cases, the Fc polypeptide present in a TMMP comprises the amino acid sequence depicted in FIG. 5E. In some cases, the Fc polypeptide present in a TMMP comprises the amino acid sequence depicted in FIG. 5F. In some cases, the Fc polypeptide present in a TMMP comprises the amino acid sequence depicted in FIG. 5G (human IgG1 Fc comprising an L234A substitution and an L235A substitution, corresponding to positions 14 and 15 of the amino acid sequence depicted in FIG. 5G). In some cases, the Fc polypeptide present in a TMMP comprises the amino acid sequence depicted in FIG. 5A (human IgG1 Fc), except for a substitution of P331 (P111 of the amino acid sequence depicted in FIG. 5A) with an amino acid other than proline; in some cases, the substitution is a P331S substitution. In some cases, the Fc polypeptide present in a TMMP comprises the amino acid sequence depicted in FIG. 5A (human IgG1 Fc), except for substitutions at L234 and L235 (L14 and L15 of the amino acid sequence depicted in FIG. 5A) with amino acids other than leucine. In some cases, the Fc polypeptide present in a TMMP comprises the amino acid sequence depicted in FIG. 5A (human IgG1 Fc), except for substitutions at L234 and L235 (L14 and L15 of the amino acid sequence depicted in FIG. 5A) with amino acids other than leucine, and a substitution of P331 (P111 of the amino acid sequence depicted in FIG. 5A) with an amino acid other than proline. In some cases, the Fc polypeptide present in a TMMP comprises the amino acid sequence depicted in FIG. 5E (human IgG1 Fc comprising L234F, L235E, and P331S substitutions (corresponding to amino acid positions 14, 15, and 111 of the amino acid sequence depicted in FIG. 5E). In some cases, the Fc polypeptide present in a TMMP is an IgG1 Fc polypeptide that comprises L234A and L235A substitutions (substitutions of L14 and L15 of the amino acid sequence depicted in FIG. 5A with Ala), as depicted in FIG. 5G.

### Linkers

[0192] A TMMP of the present disclosure can include one or more linkers, where the one or more linkers are between one or more of: i) an MHC Class I polypeptide and an Ig Fc polypeptide, where such a linker is referred to herein as “L1”; ii) an immunomodulatory polypeptide and an MHC Class I polypeptide, where such a linker is referred to herein as “L2”; iii) a first immunomodulatory polypeptide and a second immunomodulatory polypeptide, where such a linker is referred to herein as “L3”; iv) a peptide antigen (“epitope”) and an MHC Class I polypeptide; v) an MHC Class I polypeptide and a dimerization polypeptide (e.g., a first or a second member of a dimerizing pair); and vi) a dimerization polypeptide (e.g., a first or a second member of a dimerizing pair) and an IgFc polypeptide.

[0193] Suitable linkers (also referred to as “spacers”) can be readily selected and can be of any of a number of suitable lengths, such as from 1 amino acid to 25 amino acids, from 3 amino acids to 20 amino acids, from 2 amino acids to 15 amino acids, from 3 amino acids to 12 amino acids, including 4 amino acids to 10 amino acids, 5 amino acids to 9 amino acids, 6 amino acids to 8 amino acids, or 7 amino acids to 8 amino acids. A suitable linker can be 1, 2, 3, 4, 5, 6, 7, 8, 9, 10, 11, 12, 13, 14, 15, 16, 17, 18, 19, 20, 21, 22, 23, 24, or 25 amino acids in length. In some cases, a linker has a length of from 25 amino acids to 50 amino acids, e.g., from 25 to 30, from 30 to 35, from 35 to 40, from 40 to 45, or from 45 to 50 amino acids in length.

[0194] Exemplary linkers include glycine polymers (G)ₙ, glycine-serine polymers (including, for example, (GS)ₙ, (GSGGS)ₙ (SEQ ID NO:366) and (GGGS)ₙ (SEQ ID NO:367), where n is an integer of at least one), glycine-alanine polymers, alanine-serine polymers, and other flexible linkers known in the art. Glycine and glycine-serine polymers can be used; both Gly and Ser are relatively unstructured, and therefore can serve as a neutral tether between components. Glycine polymers can be used; glycine accesses significantly more phi-psi space than even alanine, and is much less restricted than residues with longer side chains (see Scheraga, Rev. Computational Chem. 11173-142 (1992)). Exemplary linkers can comprise amino acid sequences including, but not limited to, GGSG (SEQ ID NO:368), GGSGG (SEQ ID NO:369), GSGSG (SEQ ID NO:370), GSGGG (SEQ ID NO:371), GGGSG (SEQ ID NO:372), GSSSG (SEQ ID NO:373), and the like. Exemplary linkers can include, e.g., Gly(Ser₄)n (SEQ ID NO:374), where n is 1, 2, 3, 4, 5, 6, 7, 8, 9, or 10. In some cases, a linker comprises the amino acid sequence (GSSSS)n (SEQ ID NO:375), where n is 4. In some cases, a linker comprises the amino acid sequence (GSSSS)n (SEQ ID NO:376), where n is 5. In some cases, a linker comprises the amino acid sequence (GGGGS)n (SEQ ID NO:377), where n is 1. In some cases, a linker comprises the amino acid sequence (GGGGS)n (SEQ ID NO:378), where n is 2. In some cases, a linker comprises the amino acid sequence (GGGGS)n (SEQ ID NO:379), where n is 3. In some cases, a linker comprises the amino acid sequence (GGGGS)n (SEQ ID NO:380), where n is 4. In some cases, a linker comprises the amino acid sequence (GGGGS)n (SEQ ID NO:381), where n is 5. In some cases, a linker comprises the amino acid sequence (GGGGS)n (SEQ ID NO:382), where n is 6. In some cases, a linker comprises the amino acid sequence (GGGGS)n (SEQ ID NO:383), where n is 7, In some cases, a linker comprises the amino acid sequence (GGGGS)n (SEQ ID NO:384), where n is 8, In some cases, a linker comprises the amino acid sequence (GGGGS)n (SEQ ID NO:385), where n is 9, In some cases, a linker comprises the amino acid sequence (GGGGS)n (SEQ ID NO:386), where n is 10. In some cases, a linker comprises the amino acid sequence AAAGG (SEQ ID NO:387).

[0195] In some cases, a linker polypeptide, present in a first polypeptide of a TMMP of the present disclosure, includes a cysteine residue that can form a disulfide bond with a cysteine residue present in a second polypeptide of a TMMP of the present disclosure. In some cases, for example, a suitable linker comprises the amino acid sequence GCGGSGGGGSGGGGS (SEQ ID NO:317). As another example, a suitable linker can comprise the amino acid sequence GCGGS(G4S)n (SEQ ID NO:315), where n is 1, 2, 3, 4, 5, 6, 7, 8, or 9. For example, in some cases, the linker comprises the amino acid sequence GCGGSGGGGSGGGGSGGGGS (SEQ ID NO:316). As another example, the linker comprises the amino acid sequence GCGGSGGGGSGGGGS (SEQ ID NO:317).

### Epitopes

[0196] An epitope (a peptide presenting one or more epitopes) present in a TMMP of the present disclosure is an alpha-fetoprotein (AFP) peptide. An amino acid sequence of AFP is presented in FIG. 3. An AFP peptide that presents one or more epitopes is referred to herein as an “AFP peptide” or an “AFP epitope.” In some cases, an AFP epitope present in a TMMP of the present disclosure can be a peptide of from 4 to 25 contiguous amino acids (e.g., 4 amino acids (aa), 5 aa, 6 aa, 7 aa, 8 aa, 9 aa, 10-15 aa, 15-20 aa, or 20-25 aa) of an amino acid sequence having at least 90%, at least 95%, at least 98%, at least 99%, or 100%, amino acid sequence identity to the AFP amino acid sequence depicted in FIG. 3. In some cases, an AFP epitope present in a TMMP of the present disclosure is 6 amino acids in length. In some cases, an AFP epitope present in a TMMP of the present disclosure is 7 amino acids in length. In some cases, an AFP epitope present in a TMMP of the present disclosure is 8 amino acids in length. In some cases, an AFP epitope present in a TMMP of the present disclosure is 9 amino acids in length. In some cases, an AFP epitope present in a TMMP of the present disclosure is 10 amino acids in length. In some cases, an AFP epitope present in a TMMP of the present disclosure is 11 amino acids in length. In some cases, an AFP epitope present in a TMMP of the present disclosure is from 6 amino acids to 25 amino acids in length. In some cases, an AFP epitope present in a TMMP of the present disclosure is from 6 amino acids to 20 amino acids in length. In some cases, an MT epitope present in a TMMP of the present disclosure is from 7 amino acids to 25 amino acids in length. In some cases, an AFP epitope present in a TMMP of the present disclosure is from 7 amino acids to 20 amino acids in length. In some cases, an AFP epitope present in a TMMP of the present disclosure is at least 4 amino acids in length, at least 6 amino acids in length, or at least 7 amino acids in length.

[0197] An epitope present in a TMMP of the present disclosure can have a length of from about 4 amino acids to about 25 amino acids, e.g., the epitope can have a length of from 4 amino acids (aa) to 10 aa, from 10 aa to 15 aa, from 15 aa to 20 aa, or from 20 aa to 25 aa. For example, an epitope present in a TMMP of the present disclosure can have a length of 4 amino acids (aa), 5 aa, 6 aa, 7, aa, 8 aa, 9 aa, 10 aa, 11 aa, 12 aa, 13 aa, 14 aa, 15 aa, 16 aa, 17 aa, 18 aa, 19 aa, 20 aa, 21 aa, 22 aa, 23 aa, 24 aa, or 25 aa. In some cases, an epitope present in a TMMP has a length of from 5 amino acids to 10 amino acids, e.g., 5 aa, 6 aa, 7 aa, 8 aa, 9 aa, or 10 aa.

[0198] An AFP epitope present in a TMMP of the present disclosure is a peptide specifically bound by a T-cell, i.e., the epitope is specifically hound by an AFP epitope-specific T cell. An epitope-specific T cell binds an epitope having a reference amino acid sequence, but does not substantially bind an epitope that differs from the reference amino acid sequence. For example, an epitope-specific T cell binds an epitope having a reference amino acid sequence, and binds an epitope that differs from the reference amino acid sequence, if at all, with an affinity that is less than 10⁻⁶ M, less than 10⁻⁵ M, or less than 10⁻⁴ M. An epitope-specific T cell can bind an epitope for which it is specific with an affinity of at least 10⁻⁷ M, at least 10⁸ M, at least 10⁻⁹ M, or at least 10⁻¹⁰ M.

[0199] Examples of AFP peptides suitable for inclusion in a TMMP of the present disclosure include, but are not limited to,

AITRKMAAT (449-457; SEQ ID NO:479); AYTKKAPQL (434-442;
SEQ ID NO:480); LLNQHACAV (218-226; SEQ ID NO:481); KLVLDVAHV (257-265; SEQ ID
NO:482); FMNKFIYEI (158-166; SEQ ID NO:483); SIPLEQVPE (135-143; SEQ ID NO:484);
LLNFTESRT (12-20; SEQ ID NO:485); FVQEATYKF (54-62; SEQ ID NO:486); ATYKEVSKM (58-
66; SEQ ID NO:487); KEVSKMVKD (61-69; SEQ ID NO:488); RHNCFLAFK (121-129; SEQ ID
NO:489); ATAATCCQL (456-464; SEQ ID NO:490); YIQESQALA (404-412; SEQ ID NO:491);
QLTSSELMAI (441-450; SEQ ID NO:492); KLSQKFTKV (242-250; SEQ ID NO:493); KELRESSLL
(211-219; SEQ ID NO:494); SLVVDETYV (514-522; SEQ ID NO:495); ILLWAARYD (178-186; SEQ
ID NO:496); KIIPSCCKA (187-195; SEQ ID NO:497); CRGDVLDCL (270-278; SEQ ID NO:498);
QQDTLSNKI (291-299; SEQ ID NO:499); TMKQEFLINL (547-556; SEQ ID NO:500); NLVKQKPQI
(555-563; SEQ ID NO:501); AVIADFSGL (570-578; SEQ ID NO:502); LLACGEGAA (469-477; SEQ
ID NO:503); LACGEGAAD (470-478; SEQ ID NO:504); KAPQLTSSEL (438-447; SEQ ID NO:505);
YICSQQDTL (287-295; SEQ ID NO:506); TECCKETTL (300-308; SEQ ID NO:507); CTAEISLADL
(37-46; SEQ ID NO:508); VTKELRESSL (209-218; SEQ ID NO:509); IMSYICSQQD (284-293; SEQ
ID NO:510); TRTFQAITV (232-240; SEQ ID NO:511); FQKLGEYYL (419-427; SEQ ID NO:512);
RVAKGYQEL (372-380; SEQ ID NO:513); SYQCTAEISL (34-43; SEQ ID NO:514); KQEFLINLV
(549-557; SEQ ID NO:515); MKWVESIFL (1-9; SEQ ID NO:516); PVNPGVGQC (492-500; SEQ ID
NO:517); AADIIIGHL (476-484; SEQ ID NO:518); QVPEPVTSC (140-148; SEQ ID NO:519);
TTLERGQII (306-315; SEQ ID NO:520); KMAATAATC (453-461; SEQ ID NO:521);
QAQGVALQTM (539-548; SEQ ID NO:522); FQAITVTKL (235-243; SEQ ID NO:523);
LLEKCFQTE (380-388; SEQ ID NO:524); VAYTKKAPQ (433-441; SEQ ID NO:525); KYIQESQAL
(403-411; SEQ ID NO:526); GVALQTMKQ (542-550; SEQ ID NO:527); GQEQEVCFA (585-593;
SEQ ID NO:528); SEEGRHNCFL (117-126; SEQ ID NO:529); RHPFLYAPTI (169-178; SEQ ID
NO:530); TEIQKLVLDV (253-262; SEQ ID NO:531); RRHPQLAVSV (360-369; SEQ ID NO:532);
GEYYLQNAFL (423-432; SEQ ID NO:533); NRRPCFSSLV (507-516; SEQ ID NO:534);
LQTMKQEFLI (545-554; SEQ ID NO:535); IADFSGLLEK (572-581; SEQ ID NO:536);
GLLEKCCQGQ (577-586; SEQ ID NO:537); TLSNKITEC (294-302; SEQ ID NO:538);
LQDGEKIMSY (278-287; SEQ ID NO:539); GLFQKLGBY (417-425; SEQ ID NO:540);
NEYGIASILD (24-33; SEQ ID NO:541); KMVKDALTAI (65-74; SEQ ID NO:542); FLASFVHEY
(350-358; SEQ ID NO:543); and AQFVQEATY (52-60; SEQ ID NO:544).

The position of the peptide in the amino acid sequence depicted in FIG. 3 is provided in the parentheses, followed by the sequence identifier.

[0200] In some cases, an AFP peptide suitable for inclusion in a TMMP of the present disclosure is selected from the group consisting of:

FMNKFIYEI (158-166; SEQ ID NO:483); LLNFTESRT (12-20;SEQ ID NO:485);
YIQESQALA (404-412; SEQ ID NO:491); QLTSSELMAI (441-450; SEQ ID
NO:492); ILLWAARYD (178-186; SEQ ID NO:496); TMKQEFLINL (547-556; SEQ ID NO:500);
NLVKQKPQI (SEQ ID NO:501); YICSQQDTL (287-295; SEQ ID NO:506); MKWVESIFL (1-9; SEQ
ID NO:516); PVNPGVGQC (492-500; SEQ ID NO:517); FQAITVTKL (235-243; SEQ ID NO:523);
and GVALQTMKQ (542-550; SEQ ID NO:527).

[0201] In some cases, an AFP peptide suitable for inclusion in a TMMP of the present disclosure is selected from the group consisting of:

KYIQESQAL (SEQ ID NO:526); EYYLQNAFL (SEQ ID
NO:533); AYTKKAPQL (SEQ ID NO:480); EYSRRHPQL (SEQ ID NO:546); AYEEDRETF (SEQ ID
NO:547); SYANRRPCF (SEQ ID NO:548); CFAEEGQKL (SEQ ID NO:549); RSCGLFQKL (SEQ ID
NO:550); IFLIFLLNF (SEQ ID NO:551); KPEGLSPNL (SEQ ID NO:552); FMNKFIYEI (SEQ ID
NO:553); and GLSPNLNRFL (SEQ ID NO:554).

[0202] In some cases, the AFP peptide present in a TMMP of the present disclosure presents an HLA-A*2402-restricted epitope. Non-Limiting examples of AFP peptides that present an HLA-A*2402-restricted epitope are:

KYIQESQAL (SEQ ID NO:526); EYYLQNAFL (SEQ ID NO:533);
AYTKKAPQL (SEQ ID NO:480); EYSRRHPQL (SEQ ID NO:546); RSCGLFQKL (SEQ ID NO:550)
and AYEEDRETF (SEQ ID NO:547).

[0203] In some cases, the AFP peptide present in a TMMP of the present disclosure is

(SEQ ID NO:526)
KYIQESQAL.

In some cases, the AFP peptide present in a TMMP of the present disclosure is

(SEQ ID N0:533)
EYYLQNAFL.

In some cases, the AFP peptide present in a TMMP of the present disclosure is

(SEQ ID NO:480)
AYTKKAPQL.

In some cases, the AFP peptide present in a TMMP of the present disclosure is

(SEQ ID NO:546)
EYSRRHPQL.

In some cases, the AFP peptide present in a TMMP of the present disclosure is

(SEQ ID NO:550)
RSCGLFQKL.

[0204] In some cases, the AFP peptide present in a TMMP of the present disclosure presents an HLA-A*0201-restricted epitope. Non-limiting examples of AFP peptides that present an HLA-A*0201-restricted epitope are:

(SEQ ID NO:483)
FMNKFIYEI;

and

(SEQ ID NO:554)
GLSPNLNRFL.

### HLA/Peptide Binding Assays

[0205] Whether a given peptide (e.g., AFP peptide) binds a class I HLA (comprising an HLA heavy chain and a β2M polypeptide), and, when bound to the HLA complex, can effectively present an epitope to a TCR, can be determined using any of a number of well-known methods. Assays include binding assays and T-cell activation assays.

### Cell-Based Binding Assay

[0206] As one example, a cell-based peptide-induced stabilization assay can be used to determine peptide-HLA class I binding. In this assay, a peptide of interest is allowed to bind to a TAP-deficient cell, i.e., a cell that has defective transporter associated with antigen processing (TAP) machinery, and consequently, few surface class I molecules. Such cells include, e.g., the human T2 cell line (T2 (174 x CEM.T2; American Type Culture Collection (ATCC) No. CRL-1992). Henderson et al. (1992) Science 255:1264. Without efficient TAP-mediated transport of cytosolic peptides into the endoplasmic reticulum, assembled class I complexes are structurally unstable, and retained only transiently at the cell surface. However, when T2 cells are incubated with an exogenous peptide capable of binding class I, surface peptide-HLA class I complexes are stabilized and can be detected by flow cytometry with, e.g., a pan anti-class I monoclonal antibody. The stabilization and resultant increased life-span of peptide-HLA complexes on the cell surface by the addition of a peptide validates their identity. Analysis can be carried out using flow cytometry, e.g., where the pan-HLA class I antibody comprises a fluorescent label. Binding of the peptide to various allelic forms of HLA H chains can be tested by genetically modifying the T2 cells to express an allelic HLA H chain of interest.

[0207] The following is a non-limiting example of use of a T2 assay to assess peptide binding to HLA A*0201. T2 cells are washed in cell culture medium, and concentrated to 10⁶ cells/ml. Peptides of interest are prepared in cell culture medium and serially diluted providing concentrations of 200 μM, 100 μM, 20 μM and 2 μM. The cells are mixed 1:1 with each peptide dilution to give a final volume of 200 μL and final peptide concentrations of 100 μM, 50 μM, 10 μM and 1 μM. A HLA A*0201 binding peptide, GILGFVFTL, and a non-HLA A*0201-restricted peptide, HPVGEADYF (HLA-B*3501), are included as positive and negative controls, respectively. The cell/peptide mixtures are kept at 37° C. 5% CO₂ for ten minutes; then incubated at room temperature overnight. Cells are then incubated for 2 hours at 37° C. and stained with a fluorescently-labeled anti-human HLA antibody. The cells are washed twice with phosphate-buffered saline and analyzed using flow cytometry. The average mean fluorescence intensity (MFI) of the anti-HLA antibody staining is used to measure the strength of binding.

### Biochemical Binding Assay

[0208] HLA polypeptides (HLA heavy chain polypeptide complexed with β2M polypeptide) can be tested for binding to a peptide of interest in a cell-free in vitro assay system. For example, a labeled reference peptide (e.g., fluorescently labeled) is allowed to bind to HLA polypeptides (HLA heavy chain polypeptide complexed with β2M polypeptide), to form an HLA-reference peptide complex. The ability of a test peptide of interest to displace the labeled reference peptide from the HLA-reference peptide complex is tested. The relative binding affinity is calculated as the amount of test peptide needed to displace the bound reference peptide. See, e.g., van der Burg et al. (1995) Human Immunol. 44:189.

[0209] As another example, a peptide of interest can be incubated with an HLA molecule (HLA heavy chain complexed with a β2M polypeptide), and the stabilization of the HLA/peptide complex can be measured in an immunoassay format. The ability of a peptide of interest to stabilize an HLA molecule is compared to that of a control peptide presenting a known T-cell epitope. Detection of stabilization is based on the presence or absence of the native conformation of the HLA/peptide complex, detected using an anti-HLA antibody. See, e.g., Westrop et al. (2009) J. Immunol. Methods 341:76; Steinitz et al. (2012) Blood 119:4073; and U.S. Pat. No. 9,205,144.

### T-Cell Activation Assays

[0210] Whether a given peptide binds a class I HLA (comprising an HLA heavy chain and a β2M polypeptide), and, when bound to the HLA complex, can effectively present an epitope to a TCR, can be determined by assessing T-cell response to the peptide-HLA complex. T-cell responses that can be measured include, e.g., interferon-gamma (IFNγ) production, cytotoxic activity, and the like.

### ELISPOT Assay

[0211] Suitable assays include, e.g., an enzyme linked immunospot (ELISPOT) assay. In this assay, production of IFNγ by CD8⁺ T cells is measured following with an antigen-presenting cell (APC) that presents a peptide of interest complexed with HLA class I. Antibody to IFNγ is immobilized on wells of a multi-well plate. APCs are added to the wells, and incubated for a period of time with a peptide of interest, such that the peptide binds HLA class I on the surface of the APCs. CD8⁺ T cells specific for the peptide are added to the wells, and the plate is incubated for about 24 hours. The wells are then washed, and any IFNγ bound to the immobilized anti-IFNγ antibody is detected using a detectably labeled anti-IFNγ antibody. A colorimetric assay can be used. For example, the detectably labeled anti-IFNγ antibody can be a biotin-labeled anti-IFNγ antibody, which can be detected using, e.g., streptavidin conjugated to alkaline phosphatase. A BCIP/NBT (5-bromo-4-chloro-3-indolyl phosphate/nitro blue tetrazolium) solution is added, to develop the assay. The presence of IFNγ-secreting T cells is identified by colored spots. Negative controls include APCs not contacted with the peptide. APCs expressing various HLA H chain alleles can be used to determine whether a peptide of interest effectively binds to a HLA class I molecule comprising a particular HLA H chain.

### Cytotoxicity Assays

[0212] Whether a given peptide binds to a particular HLA class I H chain and, when hound to a HLA class I complex comprising the H chain, can effectively present an epitope to a TCR, can also be determined using a cytotoxicity assay. A cytotoxicity assay involves incubation of a target cell with a cytotoxic CD8⁺ T cell. The target cell displays on its surface a peptide/HLA class I complex comprising a peptide of interest and an HLA class I molecule comprising an HLA H chain to be tested. The target cells can be radioactively labeled, e.g., with ⁵¹Cr. Whether the target cell effectively presents an epitope to a TCR on the cytotoxic CD8⁺ T cell, thereby inducing cytotoxic activity by the CD8⁺ T cell toward the target cell, is determined by measuring release of ⁵¹Cr from the lysed target cell. Specific cytotoxicity can be calculated as the amount of cytotoxic activity in the presence of the peptide minus the amount of cytotoxic activity in the absence of the peptide.

Detection of Antigen-Specific T Cells with Peptide-HLA Tetramers

[0213] As another example, multimers (e.g., tetramers) of peptide-HLA complexes are generated with fluorescent or heavy metal tags. The multimers can then be used to identify and quantify specific T cells via flow cytometry (FACS) or mass cytometry (CyTOF). Detection of epitope-specific T cells provides direct evidence that the peptide-bound HLA molecule is capable of binding to a specific TCR on a subset of antigen-specific T cells. See, e.g., Klenerman et al. (2002) Nature Reviews Immunol. 2:263.

### Immunomodulatory Polypeptides

[0214] In some cases, an immunomodulatory polypeptide present in a TMMP of the present disclosure is a wild-type immunomodulatory polypeptide. In other cases, an immunomodulatory polypeptide present in a TMMP of the present disclosure is a variant immunomodulatory polypeptide that has reduced affinity for a co-immunomodulatory polypeptide, compared to the affinity of a corresponding wild-type immunomodulatory polypeptide for the co-immunomodulatory polypeptide. Suitable immunomodulatory domains that exhibit reduced affinity for a co-immunomodulatory domain can have from 1 amino acid (aa) to 20 aa differences from a wild-type immunomodulatory domain. For example, in some cases, a variant immunomodulatory polypeptide present in a TMMP of the present disclosure differs in amino acid sequence by 1 aa, 2 aa, 3 aa, 4 aa, 5 aa, 6 aa, 7 aa, 8 aa, 9 aa, or 10 aa, from a corresponding wild-type immunomodulatory polypeptide. As another example, in some cases, a variant immunomodulatory polypeptide present in a TMMP of the present disclosure differs in amino acid sequence by 11 aa, 12 aa, 13 aa, 14 aa, 15 aa, 16 aa, 17 aa, 18 aa, 19 aa, or 20 aa, from a corresponding wild-type immunomodulatory polypeptide. As an example, in some cases, a variant immunomodulatory polypeptide present in a TMMP of the present disclosure includes 1, 2, 3, 4, 5, 6, 7, 8, 9, or 10 amino acid substitutions, compared to a corresponding reference (e.g., wild-type) immunomodulatory polypeptide. In some cases, variant immunomodulatory polypeptide present in a TMMP of the present disclosure includes a single amino acid substitution compared to a corresponding reference (e.g., wild-type) immunomodulatory polypeptide. In some cases, variant immunomodulatory polypeptide present in a TMMP of the present disclosure includes 2 amino acid substitutions (e.g., no more than 2 amino acid substitutions) compared to a corresponding reference (e.g., wild-type) immunomodulatory polypeptide. In some cases, variant immunomodulatory polypeptide present in a TMMP of the present disclosure includes 3 amino acid substitutions (e.g., no more than 3 amino acid substitutions) compared to a corresponding reference (e.g., wild-type) immunomodulatory polypeptide. In some cases, variant immunomodulatory polypeptide present in a TMMP of the present disclosure includes 4 amino acid substitutions (e.g., no more than 4 amino acid substitutions) compared to a corresponding reference (e.g., wild-type) immunomodulatory polypeptide. In some cases, variant immunomodulatory polypeptide present in a TMMP of the present disclosure includes 5 amino acid substitutions (e.g., no more than 5 amino acid substitutions) compared to a corresponding reference (e.g., wild-type) immunomodulatory polypeptide. In some cases, variant immunomodulatory polypeptide present in a TMMP of the present disclosure includes 6 amino acid substitutions (e.g., no more than 6 amino acid substitutions) compared to a corresponding reference (e.g., wild-type) immunomodulatory polypeptide. In some cases, variant immunomodulatory polypeptide present in a TMMP of the present disclosure includes 7 amino acid substitutions (e.g., no more than 7 amino acid substitutions) compared to a corresponding reference (e.g., wild-type) immunomodulatory polypeptide. In some cases, variant immunomodulatory polypeptide present in a TMMP of the present disclosure includes 8 amino acid substitutions (e.g., no more than 8 amino acid substitutions) compared to a corresponding reference (e.g., wild-type) immunomodulatory polypeptide. In some cases, variant immunomodulatory polypeptide present in a TMMP of the present disclosure includes 9 amino acid substitutions (e.g., no more than 9 amino acid substitutions) compared to a corresponding reference (e.g., wild-type) immunomodulatory polypeptide. In some cases, variant immunomodulatory polypeptide present in a TMMP of the present disclosure includes 10 amino acid substitutions (e.g., no more than 10 amino acid substitutions) compared to a corresponding reference (e.g., wild-type) immunomodulatory polypeptide.

[0215] In some cases, variant immunomodulatory polypeptide present in a TMMP of the present disclosure includes 11 amino acid substitutions (e.g., no more than 11 amino acid substitutions) compared to a corresponding reference (e.g., wild-type) immunomodulatory polypeptide.

[0216] In some cases, variant immunomodulatory polypeptide present in a TMMP of the present disclosure includes 12 amino acid substitutions (e.g., no more than 12 amino acid substitutions) compared to a corresponding reference (e.g., wild-type) immunomodulatory polypeptide.

[0217] In some cases, variant immunomodulatory polypeptide present in a TMMP of the present disclosure includes 13 amino acid substitutions (e.g., no more than 13 amino acid substitutions) compared to a corresponding reference (e.g., wild-type) immunomodulatory polypeptide.

[0218] In some cases, variant immunomodulatory polypeptide present in a TMMP of the present disclosure includes 14 amino acid substitutions (e.g., no more than 14 amino acid substitutions) compared to a corresponding reference (e.g., wild-type) immunomodulatory polypeptide.

[0219] In some cases, variant immunomodulatory polypeptide present in a TMMP of the present disclosure includes 15 amino acid substitutions (e.g., no more than 15 amino acid substitutions) compared to a corresponding reference (e.g., wild-type) immunomodulatory polypeptide.

[0220] In some cases, variant immunomodulatory polypeptide present in a TMMP of the present disclosure includes 16 amino acid substitutions (e.g., no more than 16 amino acid substitutions) compared to a corresponding reference (e.g., wild-type) immunomodulatory polypeptide.

[0221] In some cases, variant immunomodulatory polypeptide present in a TMMP of the present disclosure includes 17 amino acid substitutions (e.g., no more than 17 amino acid substitutions) compared to a corresponding reference (e.g., wild-type) immunomodulatory polypeptide.

[0222] In some cases, variant immunomodulatory polypeptide present in a TMMP of the present disclosure includes 18 amino acid substitutions (e.g., no more than 18 amino acid substitutions) compared to a corresponding reference (e.g., wild-type) immunomodulatory polypeptide.

[0223] In some cases, variant immunomodulatory polypeptide present in a TMMP of the present disclosure includes 19 amino acid substitutions (e.g., no more than 19 amino acid substitutions) compared to a corresponding reference (e.g., wild-type) immunomodulatory polypeptide.

[0224] In some cases, variant immunomodulatory polypeptide present in a TMMP of the present disclosure includes 20 amino acid substitutions (e.g., no more than 20 amino acid substitutions) compared to a corresponding reference (e.g., wild-type) immunomodulatory polypeptide.

[0225] As discussed above, a variant immunomodulatory polypeptide suitable for inclusion in a TMMP of the present disclosure exhibits reduced affinity for a cognate co-immunomodulatory polypeptide, compared to the affinity of a corresponding wild-type immunomodulatory polypeptide for the cognate co-immunomodulatory polypeptide.

[0226] Exemplary pairs of immunomodulatory polypeptide and cognate co-immunomodulatory polypeptide include, but are not limited to:

[0227] a) 4-1BBL (immunomodulatory polypeptide) and 4-1BB (cognate co-immunomodulatory polypeptide);

[0228] b) PD-L1 (immunomodulatory polypeptide) and PD1 (cognate co-immunomodulatory polypeptide);

[0229] c) IL-2 (immunomodulatory polypeptide) and IL-2 receptor (cognate co-immunomodulatory polypeptide);

[0230] d) CD80 (immunomodulatory polypeptide) and CD86 (cognate co-immunomodulatory polypeptide);

[0231] e) CD86 (immunomodulatory polypeptide) and CD28 (cognate co-immunomodulatory polypeptide);

[0232] f) OX40L (CD252) (immunomodulatory polypeptide) and OX40 (CD134) (cognate co-immunomodulatory polypeptide);

[0233] g) Fas ligand (immunomodulatory polypeptide) and Fas (cognate co-immunomodulatory polypeptide);

[0234] h) ICOS-L (immunomodulatory polypeptide) and ICOS (cognate co-immunomodulatory polypeptide);

[0235] i) ICAM (immunomodulatory polypeptide) and LFA-1 (cognate co-immunomodulatory polypeptide);

[0236] j) CD30L (immunomodulatory polypeptide) and CD30 (cognate co-immunomodulatory polypeptide);

[0237] k) CD40 (immunomodulatory polypeptide) and CD40L (cognate co-immunomodulatory polypeptide);

[0238] l) CD83 (immunomodulatory polypeptide) and CD83L (cognate co-immunomodulatory polypeptide);

[0239] m) HVEM (CD270) (immunomodulatory polypeptide) and CD160 (cognate co-immunomodulatory polypeptide);

[0240] n) JAG1 (CD339) (immunomodulatory polypeptide) and Notch (cognate co-immunomodulatory polypeptide);

[0241] o) JAG1 (immunomodulatory polypeptide) and CD46 (cognate co-immunomodulatory polypeptide);

[0242] p) CD80 (immunomodulatory polypeptide) and CTLA4 (cognate co-immunomodulatory polypeptide);

[0243] q) CD86 (immunomodulatory polypeptide) and CTLA4 (cognate co-immunomodulatory polypeptide); and

[0244] r) CD70 (immunomodulatory polypeptide) and CD27 (cognate co-immunomodulatory polypeptide).

[0245] In some cases, a variant immunomodulatory polypeptide present in a TMMP of the present disclosure has a binding affinity for a cognate co-immunomodulatory polypeptide that is from 100 nM to 100 μM. For example, in some cases, a variant immunomodulatory polypeptide present in a TMMP of the present disclosure has a binding affinity for a cognate co-immunomodulatory polypeptide that is from about 100 nM to 150 nM, from about 150 nM to about 200 nM, from about 200 nM to about 250 nM, from about 250 nM to about 300 nM, from about 300 nM to about 350 nM, from about 350 nM to about 400 nM, from about 400 nM to about 500 nM, from about 500 nM to about 600 nM, from about 600 nM to about 700 nM, from about 700 nM to about 800 nM, from about 800 nM to about 900 nM, from about 900 nM to about 1 μM, to about 1 μM to about 5 μM, from about 5 μM to about 10 μM, from about 10 μM to about 15 μM, from about 15 μM to about 20 μM, from about 20 μM to about 25 μM, from about 25 μM to about 50 μM, from about 50 μM to about 75 μM, or from about 75 μM to about 100 μM.

[0246] A variant immunomodulatory polypeptide present in a TMMP of the present disclosure exhibits reduced affinity for a cognate co-immunomodulatory polypeptide. Similarly, a TMMP of the present disclosure that comprises a variant immunomodulatory polypeptide exhibits reduced affinity for a cognate co-immunomodulatory polypeptide. Thus, for example, a TMMP of the present disclosure that comprises a variant immunomodulatory polypeptide has a binding affinity for a cognate co-immunomodulatory polypeptide that is from 100 nM to 100 μM. For example, in some cases, a TMMP of the present disclosure that comprises a variant immunomodulatory polypeptide has a binding affinity for a cognate co-immunomodulatory polypeptide that is from about 100 nM to 150 nM, from about 150 nM to about 200 nM, from about 200 nM to about 250 nM, from about 250 nM to about 300 nM, from about 300 nM to about 350 nM, from about 350 nM to about 400 nM, from about 400 nM to about 500 nM, from about 500 nM to about 600 nM, from about 600 nM to about 700 nM, from about 700 nM to about 800 nM, from about 800 nM to about 900 nM, from about 900 nM to about 1 μM, to about 1 μM to about 5 μM, from about 5 μM to about 10 μM, from about 10 μM to about 15 μM, from about 15 μM to about 20 μM, from about 20 μM to about 25 μM, from about 25 μM to about 50 μM, from about 50 μM to about 75 μM, or from about 75 μM to about 100 μM.

[0247] As depicted schematically in FIG. 21, an immunomodulatory polypeptide (i.e., one or more immunomodulatory polypeptides) can be present in a TMMP of the present disclosure at any of a variety of positions. FIG. 21 depicts the position of two copies of a variant IL-2 polypeptide; however, the immunomodulatory polypeptide can be any of a variety of immunomodulatory polypeptide, as described herein. As depicted in FIG. 21, an immunomodulatory polypeptide can be: 1) N-terminal to the MHC class I heavy chain; 2) C-terminal to the MHC class I heavy chain and N-terminal to the Ig Fc polypeptide; in other words, between the MHC class I heavy chain and the Ig Fc polypeptide; 3) C-terminal to the Ig Fc polypeptide; 4) N-terminal to the peptide epitope; or 5) C-terminal to the β2M polypeptide.

### PD-L1 Variants

[0248] As one non-limiting example, in some cases, a variant immunomodulatory polypeptide present in a TMMP of the present disclosure is a variant PD-L1 polypeptide. Wild-type PD-L1 binds to PD1.

[0249] A wild-type human PD-L1 polypeptide can comprise the following amino acid sequence:

(SEQ ID NO:1)
MRIFAVFIFMTYWHLLNAFTVTVPKDLYVVEYGSNMTIECKFPVEKQLD
LAALIVYWEMEDKNIIQFVHGEEDLKVQHSSYRQRARLLKDQLSLGNAA
LQITDVKLQDAGVYRCMISYGGADYKRITVKVNAPYNKINQRILVVDPV
TSEHELTCQAEGYPKAEVIWTSSDHQVLSGKTTTTNSKREEKLFNVTST
LRINTTNEIFYCTFRRLDPEENHTAELVIPGNILNVSIKICLTLSPST.

[0250] A wild-type human PD-L1 ectodomain can comprise the following amino acid sequence:

(SEQ ID NO:2)
FTVTVPKDLYVVEYGSNMTIECKFPVEKQLDLAALIVYWEMEDKNIIQF
VHGEEDLKVQHSSYRQRARLLKDQLSLGNAALQITDVKLQDAGVYRCMI
SYGGADYKRITVKVNAPYNKINQRILVVDPVTSEHELTCQAEGYPKAEV
IWTSSDHQVLSGKTTTTNSKREEKLFNVTSTLRINTTTNEIFYCTFRRL
DPEENHTAELVIPGNILNVSIKI.

[0251] A wild-type PD-1 polypeptide can comprise the following amino acid sequence:

(SEQ ID NO:3)
PGWFLDSPDRPWNPPTFSPALLVVTEGDNATFTCSFSNTSESFVLNWYR
MSPSNQTDKLAAFPEDRSQPGQDCRFRVTQLPNGRDFHMSVVRARRNDS
GTYLCGAISLAPKAQIKESLRAELRVTERRAEVPTAHPSPSPRPAGQFQ
TLVVGVVGGLLGSLVLLVWVLAVICSRAARGTIGARRTGQPLKEDPSAV
PVFSVDYGELDFQWREKTPEPPVPCVPEQTEYATIVFPSGMGTSSPARR
GSADGPRSAQPLRPEDGHCSWPL.

In some cases, where a TMMP of the present disclosure comprises a variant PD-L1 polypeptide, a “cognate co-immunomodulatory polypeptide” is a PD-1 polypeptide comprising the amino acid sequence of SEQ ID NO:3.

[0252] In some cases, a variant PD-L1 polypeptide exhibits reduced binding affinity to PD-1 (e.g., a PD-1 polypeptide comprising the amino acid sequence set forth in SEQ ID NO:3), compared to the binding affinity of a PD-L1 polypeptide comprising the amino acid sequence set forth in SEQ ID NO:1 or SEQ ID NO:2. For example, in some cases, a variant PD-L1 polypeptide of the present disclosure binds PD-1 (e.g., a PD-1 polypeptide comprising the amino acid sequence set forth in SEQ ID NO:3) with a binding affinity that is at least 10%, at least 15%, at least 20%, at least 25%, at least 30%, at least 35%, at least 40%, at least 45%, at least 50% less, at least 55% less, at least 60% less, at least 65% less, at least 70% less, at least 75% less, at least 80% less, at least 85% less, at least 90% less, at least 95% less, or more than 95% less, than the binding affinity of a PD-L1 polypeptide comprising the amino acid sequence set forth in SEQ ID NO:1 or SEQ ID NO:2.

[0253] In some cases, a variant PD-L1 polypeptide has a binding affinity to PD-1 that is from 1 nM to 1 mM. In some cases, a variant PD-L1 polypeptide of the present disclosure has a binding affinity to PD-1 that is from 100 nM to 100 μM. As another example, in some cases, a variant PD-L1 polypeptide has a binding affinity for PD1 (e.g., a PD1 polypeptide comprising the amino acid sequence set forth in SEQ ID NO:3) that is from about 100 nM to 150 nM, from about 150 nM to about 200 nM, from about 200 nM to about 250 nM, from about 250 nM to about 300 nM, from about 300 nM to about 350 nM, from about 350 nM to about 400 nM, from about 400 nM to about 500 nM, from about 500 nM to about 600 nM, from about 600 nM to about 700 nM, from about 700 nM to about 800 nM, from about 800 nM to about 900 nM, from about 900 nM to about 1 μM, to about 1 μM to about 5 μM, from about 5 μM to about 10 μM, from about 10 μM to about 15 μM, from about 15 μM to about 20 μM, from about 20 μM to about 25 μM, from about 25 μM to about 50 μM, from about 50 μM to about 75 μM, or from about 75 μM to about 100 μM.

[0254] In some cases, a variant PD-L1 polypeptide has a single amino acid substitution compared to the PD-L1 amino acid sequence set forth in SEQ ID NO:1 or SEQ ID NO:2. In some cases, a variant PD-L1 polypeptide has from 2 to 10 amino acid substitutions compared to the PD-L1 amino acid sequence set forth in SEQ ID NO:1 or SEQ ID NO:2. In some cases, a variant PD-L1 polypeptide has 2 amino acid substitutions compared to the PD-L1 amino acid sequence set forth in SEQ ID NO:1 or SEQ ID NO:2. In some cases, a variant PD-L1 polypeptide has 3 amino acid substitutions compared to the PD-L1 amino acid sequence set forth in SEQ ID NO:1 or SEQ ID NO:2. In some cases, a variant PD-L1 polypeptide has 4 amino acid substitutions compared to the PD-L1 amino acid sequence set forth in SEQ ID NO:1 or SEQ ID NO:2. In some cases, a variant PD-L1 polypeptide has 5 amino acid substitutions compared to the PD-L1 amino acid sequence set forth in SEQ ID NO:1 or SEQ ID NO:2. In some cases, a variant PD-L1 polypeptide has 6 amino acid substitutions compared to the PD-L1 amino acid sequence set forth in SEQ ID NO:1 or SEQ ID NO:2. In some cases, a variant PD-L1 polypeptide has 7 amino acid substitutions compared to the PD-L1 amino acid sequence set forth in SEQ ID NO:1 or SEQ ID NO:2. In some cases, a variant PD-L1 polypeptide has 8 amino acid substitutions compared to the PD-L1 amino acid sequence set forth in SEQ ID NO:1 or SEQ ID NO:2. In some cases, a variant PD-L1 polypeptide has 9 amino acid substitutions compared to the PD-L1 amino acid sequence set forth in SEQ ID NO:1 or SEQ ID NO:2. In some cases, a variant PD-L1 polypeptide has 10 amino acid substitutions compared to the PD-L1 amino acid sequence set forth in SEQ ID NO:1 or SEQ ID NO:2.

[0255] A suitable PD-L1 variant includes a polypeptide that comprises an amino acid sequence having at least 90%, at least 95%, at least 98%, at least 99%, or 100%, amino acid sequence identity to the following amino acid sequence:

(SEQ ID NO:52)
FTVTVPKXLYVVEYGSNMTIECKFPVEKQLDLAALIVYWEMEDKNIIQF
VHGEEDLKVQHSSYRQRARLLKDQLSLGNAALQITDVKLQDAGVYRCMI
SYGGADYKRITVKVNAPYNKINQRILVVDPVTSEHELTCQAEGYPKAEV
IWTSSDHQVLSGKTTTTNSKREEKLFNVTSTLRINTTTNEIFYCTFRRL
DPEENHTAELVIPGNILNVSIKI,

where X is any amino acid other than Asp. In some cases, X is Ala. In some cases, X is Arg.

[0256] A suitable PD-L1 variant includes a polypeptide that comprises an amino acid sequence having at least 90%, at least 95%, at least 98%, at least 99%, or 100%, amino acid sequence identity to the following amino acid sequence:

(SEQ ID NO:53)
FTVTVPKDLYVVEYGSNMTIECKFPVEKQLDLAALXVYWEMEDKNIIQF
VHGEEDLKVQHSSYRQRARLLKDQLSLGNAALQITDVKLQDAGVYRCMI
SYGGADYKRITVKVNAPYNKINQRILVVDPVTSEHELTCQAEGYPKAEV
IWTSSDHQVLSGKTTTTNSKREEKLFNVTSTLRINTTTNEIFYCTFRRL
DPEENHTAELVIPGNILNVSIKI,

where X is any amino acid other than Ile. In some cases, X is Asp.

[0257] A suitable PD-L1 variant includes a polypeptide that comprises an amino acid sequence having at least 90%, at least 95%, at least 98%, at least 99%, or 100%, amino acid sequence identity to the following amino acid sequence:

(SEQ ID NO:54)
FTVTVPKDLYVVEYGSNMTIECKFPVEKQLDLAALIVYWEMEDKNIIQF
VHGEXDLKVQHSSYRQRARLLKDQLSLGNAALQITDVKLQDAGVYRCMI
SYGGADYKRITVKVNAPYNKINQRILVVDPVTSEHELTCQAEGYPKAEV
IWTSSDHQVLSGKTTTTNSKREEKLFNVTSTLRINTTTNEIFYCTFRRL
DPEENHTAELVIPGNILNVSIKI,

where X is any amino acid other than Glu. In some cases, X is Arg.

### CD80 Variants

[0258] In some cases, a variant immunomodulatory polypeptide present in a TMMP of the present disclosure is a variant CD80 polypeptide. Wild-type CD80 binds to CD28. Wild-type CD80 also binds to CD86.

[0259] A wild-type amino acid sequence of the ectodomain of human CD80 can be as follows:

(SEQ ID NO:4)
[sequence omitted]

[0260] A wild-type CD28 amino acid sequence can be as follows:

(SEQ ID NO:5)
MLRLLLALNLFPSIQVTGNKILVKQSPMLVAYDNAVNLSCKYSYNLFSR
EFRASLHKGLDSAVEVCVVYGNYSQQLQVYSKTGFNCDGKLGNESVTFY
LQNLYVNQTDIYFCKIEVMYPPPYLDNEKSNGTIIHVKGKHLCPSPLFP
GPSKPFWVLVVVGGVLACYSLLVTVAFIIFWVRSKRSRLLHSDYMNMTP
RRPGPTRKHYQPYAPPRDFAAYRS.

In some cases, where a TMMP of the present disclosure comprises a variant CD80 polypeptide, a “cognate co-immunomodulatory polypeptide” is a CD28 polypeptide comprising the amino acid sequence of SEQ ID NO:5.

[0261] A wild-type CD28 amino acid sequence can be as follows:

(SEQ ID NO:6)
MLRLLLALNLFPSIQVTGNKILVKQSPMLVAYDNAVNLSWKHLCPSPLF
PGPSKPFWVLVVVGGVLACYSLLVTVAFIIFWVRSKRSRLLHSDYMNMT
PRRPGPTRKHYQPYAPPRDFAAYRS

[0262] A wild-type CD28 amino acid sequence can be as follows:

(SEQ ID NO:7)
MLRLLLALNLFPSIQVTGKHLCPSPLFPGPSKPFWVLVVVGGVLACYSL
LVTVAFIIFWVRSKRSRLLHSDYMNMTPRRPGPTRKHYQPYAPPRDFAA
YRS.

[0263] In some cases, a variant CD80 polypeptide exhibits reduced binding affinity to CD28, compared to the binding affinity of a CD80 polypeptide comprising the amino acid sequence set forth in SEQ ID NO:4 for CD28. For example, in some cases, a variant CD80 polypeptide binds CD28 with a binding affinity that is at least 10%, at least 15%, at least 20%, at least 25%, at least 30%, at least 35%, at least 40%, at least 45%, at least 50% less, at least 55% less, at least 60% less, at least 65% less, at least 70% less, at least 75% less, at least 80% less, at least 85% less, at least 90% less, at least 95% less, or more than 95% less, than the binding affinity of a CD80 polypeptide comprising the amino acid sequence set forth in SEQ ID NO:4 for CD28 (e.g., a CD28 polypeptide comprising the amino acid sequence set forth in one of SEQ ED NO:5, 6, or 7).

[0264] In some cases, a variant CD80 polypeptide has a binding affinity to CD28 that is from 100 nM to 100 μM. As another example, in some cases, a variant CD80 polypeptide of the present disclosure has a binding affinity for CD28 (e.g., a CD28 polypeptide comprising the amino acid sequence set forth in SEQ ID NO:5, SEQ ID NO:6, or SEQ ID NO:7) that is from about 100 nM to 150 nM, from about 150 nM to about 200 nM, from about 200 nM to about 250 nM, from about 250 nM to about 300 nM, from about 300 nM to about 350 nM, from about 350 nM to about 400 nM, from about 400 nM to about 500 nM, from about 500 nM to about 600 nM, from about 600 nM to about 700 nM, from about 700 nM to about 800 nM, from about 800 nM to about 900 nM, from about 900 nM to about 1 μM, to about 1 μM to about 5 μM, from about 5 μM to about 10 μM, from about 10 μM to about 15 μM, from about 15 μM to about 20 μM, from about 20 μM to about 25 μM, from about 25 μM to about 50 μM, from about 50 μM to about 75 μM, or from about 75 μM to about 100 μM.

[0265] In some cases, a variant CD80 polypeptide has a single amino acid substitution compared to the CD80 amino acid sequence set forth in SEQ ID NO:4. In some cases, a variant CD80 polypeptide has from 2 to 10 amino acid substitutions compared to the CD80 amino acid sequence set forth in SEQ ID NO:4. In some cases, a variant CD80 polypeptide has 2 amino acid substitutions compared to the CD80 amino acid sequence set forth in SEQ ID NO:4. In some cases, a variant CD80 polypeptide has 3 amino acid substitutions compared to the CD80 amino acid sequence set forth in SEQ ID NO:4. In some cases, a variant CD80 polypeptide has 4 amino acid substitutions compared to the CD80 amino acid sequence set forth in SEQ ID NO:4. In some cases, a variant CD80 polypeptide has 5 amino acid substitutions compared to the CD80 amino acid sequence set forth in SEQ ID NO:4. In some cases, a variant CD80 polypeptide has 6 amino acid substitutions compared to the CD80 amino acid sequence set forth in SEQ ID NO:4. In some cases, a variant CD80 polypeptide has 7 amino acid substitutions compared to the CD80 amino acid sequence set forth in SEQ ID NO:4. In some cases, a variant CD80 polypeptide has 8 amino acid substitutions compared to the CD80 amino acid sequence set forth in SEQ ID NO:4, In some cases, a variant CD80 polypeptide has 9 amino acid substitutions compared to the CD80 amino acid sequence set forth in SEQ ID NO:4. In some cases, a variant CD80 polypeptide has 10 amino acid substitutions compared to the CD80 amino acid sequence set forth in SEQ ID NO:4.

[0266] Suitable CD80 variants include a polypeptide that comprises an amino acid sequence having at least 90%, at least 95%, at least 98%, at least 99%, or 100%, amino acid sequence identity to any one of the following amino acid sequences:

(SEQ ID NO: 55)
VIHVTKEVKEVATLSCGHXVSVEELAQTRIYWQKEKKMVLTMMSGDMNI
WPEYKNRTIFDITNNLSIVILALRPSDEGTYECVVLKYEKDAFKREHLA
EVTLSVKADFPTPSISDFEIPTSNIRRIICSTSGGFPEPHLSWLENGEE
LNAINTTVSQDPETELYAVSSKLDFNMTTNHSFMCLIKYGHLRVNQTFN
WNTTKQEHFPDN,

where X is any amino acid other than Asn. In some cases, X is Ala;

(SEQ ID NO: 56)
VIHVTKEVKEVATLSCGHNVSVEELAQTRIYWQKEKKMVLTMMSGDMNI
WPEYKNRTIFDITXNLSIVILALRPSDEGTYECVVLKYEKDAFKREHLA
EVTLSVKADFPTPSISDFEIPTSNIRRIICSTSGGFPEPHLSWLENGEE
LNAINTTVSQDPETELYAVSSKLDFNMTTNHSFMCLIKYGHLRVNQTFN
WNTTKQEHFPDN,

where X is any amino acid other than Asn. In some cases, X is Ala;

(SEQ ID NO:57)
VIHVTKEVKEVATLSCGHNVSVEELAQTRIYWQKEKKMVLTMMSGDMNI
WPEYKNRTIFDITNNLSXVILALRPSDEGTYECVVLKYEKDAFKREHLA
EVTLSVKADFPTPSISDFEIPTSNIRRIICSTSGGFPEPHLSWLENGEE
LNAINTTVSQDPETELYAVSSKLDFNMTTNHSFMCLIKYGHLRVNQTFN
WNTTKQEHFPDN,

where X is any amino acid other than Ile. In some cases, X is Ala;

(SEQ ID NO:58)
VIHVTKEVKEVATLSCGHNVSVEELAQTRIYWQKEKKMVLTMMSGDMNI
WPEYKNRTIFDITNNLSIVILALRPSDEGTYECVVLXYEKDAFKREHLA
EVTLSVKADFPTPSISDFEIPTSNIRRIICSTSGGFPEPHLSWLENGEE
LNAINTTVSQDPETELYAVSSKLDFNMTTNHSFMCLIKYGHLRVNQTFN
WNTTKQEHFPDN,

where X is any amino acid other than Lys. In some cases, X is Ala;

(SEQ ID NO:60)
VIHVTKEVKEVATLSCGHNVSVEELAQTRIYWQKEKKMVLTMMSGDMNI
WPEYKNRTIFDITNNLSIVILALRPSDEGTYECVVLKYEKDAFKREHLA
EVTLSVKADFPTPSISDFEIPTSNIRRIICSTSGGFPEPHLSWLENGEE
LNAINTTVSXDPETELYAVSSKLDFNMTTNHSFMCLIKYGHLRVNQTFN
WNTTKQEHFPDN,

where X is any amino acid other than Gln. In some cases, X is Ala;

(SEQ ID NO:61)
VIHVTKEVKEVATLSCGHNVSVEELAQTRIYWQKEKKMVLTMMSGDMNI
WPEYKNRTIFDITNNLSIVILALRPSDEGTYECVVLKYEKDAFKREHLA
EVTLSVKADFPTPSISDFEIPTSNIRRIICSTSGGFPEPHLSWLENGEE
LNAINTTVSQXPETELYAVSSKLDFNMTTNHSFMCLIKYGHLRVNQTFN
WNTTKQEHFPDN,

where X is any amino acid other than Asp. In some cases, X is Ala;

(SEQ ID NO:62)
VIHVTKEVKEVATLSCGHNVSVEEXAQTRIYWQKEKKMVLTMMSGDMNI
WPEYKNRTIFDITNNLSIVILALRPSDEGTYECVVLKYEKDAFKREHLA
EVTLSVKADFPTPSISDFEIPTSNIRRIICSTSGGFPEPHLSWLENGEE
LNAINTTVSQDPETELYAVSSKLDFNMTTNHSFMCLIKYGHLRVNQTFN
WNTTKQEHFPDN,

where X is any amino acid other than Leu. In some cases, X is Ala;

(SEQ ID NO:63)
VIHVTKEVKEVATLSCGHNVSVEELAQTRIXWQKEKKMVLTMMSGDMNI
WPEYKNRTIFDITNNLSIVILALRPSDEGTYECVVLKYEKDAFKREHLA
EVTLSVKADFPTPSISDFEIPTSNIRRIICSTSGGFPEPHLSWLENGEE
LNAINTTVSQDPETELYAVSSKLDFNMTTNHSFMCLIKYGHLRVNQTFN
WNTTKQEHFPDN,

where X is any amino acid other than Tyr. In some cases, X is Ala;

(SEQ ID NO:64)
VIHVTKEVKEVATLSCGHNVSVEELAQTRIYWXKEKKMVLTMMSGDMNI
WPEYKNRTIFDITNNLSIVILALRPSDEGTYECVVLKYEKDAFKREHLA
EVTLSVKADFPTPSISDFEIPTSNIRRIICSTSGGFPEPHLSWLENGEE
LNAINTTVSQDPETELYAVSSKLDFNMTTNHSFMCLIKYGHLRVNQTFN
WNTTKQEHFPDN,

where X is any amino acid other than Gln. In some cases, X is Ala;

(SEQ ID NO:65)
VIHVTKEVKEVATLSCGHNVSVEELAQTRIYWQKEKKXVLTMMSGDMNI
WPEYKNRTIFDITNNLSIVILALRPSDEGTYECVVLKYEKDAFKREHLA
EVTLSVKADFPTPSISDFEIPTSNIRRIICSTSGGFPEPHLSWLENGEE
LNAINTTVSQDPETELYAVSSKLDFNMTTNHSFMCLIKYGHLRVNQTFN
WNTTKQEHFPDN,

where X is any amino acid other than Met. In some cases, X is Ala;

(SEQ ID NO:66)
VIHVTKEVKEVATLSCGHNVSVEELAQTRIYWQKEKKMXLTMMSGDMNI
WPEYKNRTIFDITNNLSIVILALRPSDEGTYECVVLKYEKDAFKREHLA
EVTLSVKADFPTPSISDFEIPTSNIRRIICSTSGGFPEPHLSWLENGEE
LNAINTTVSQDPETELYAVSSKLDFNMTTNHSFMCLIKYGHLRVNQTFN
WNTTKQEHFPDN,

where X is any amino acid other than Val. In some cases, X is Ala;

(SEQ ID NO:67)
VIHVTKEVKEVATLSCGHNVSVEELAQTRIYWQKEKKMVLTMMSGDMNX
WPEYKNRTIFDITNNLSIVILALRPSDEGTYECVVLKYEKDAFKREHLA
EVTLSVKADFPTPSISDFEIPTSNIRRIICSTSGGFPEPHLSWLENGEE
LNAINTTVSQDPETELYAVSSKLDFNMTTNHSFMCLIKYGHLRVNQTFN
WNTTKQEHFPDN,

where X is any amino acid other than Ile. In some cases, X is Ala;

(SEQ ID NO:68)
VIHVTKEVKEVATLSCGHNVSVEELAQTRIYWQKEKKMVLTMMSGDMNI
WPEXKNRTIFDITNNLSIVILALRPSDEGTYECVVLKYEKDAFKREHLA
EVTLSVKADFPTPSISDFEIPTSNIRRIICSTSGGFPEPHLSWLENGEE
LNAINTTVSQDPETELYAVSSKLDFNMTTNHSFMCLIKYGHLRVNQTFN
WNTTKQEHFPDN,

where X is any amino acid other than Tyr. In some cases, X is Ala;

(SEQ ID NO:69)
VIHVTKEVKEVATLSCGHNVSVEELAQTRIYWQKEKKMVLTMMSGDMNI
WPEYKNRTIFXITNNLSIVILALRPSDEGTYECVVLKYEKDAFKREHLA
EVTLSVKADFPTPSISDFEIPTSNIRRIICSTSGGFPEPHLSWLENGEE
LNAINTTVSQDPETELYAVSSKLDFNMTTNHSFMCLIKYGHLRVNQTFN
WNTTKQEHFPDN.

where X is any amino acid other than Asp. In some cases, X is Ala;

(SEQ ID NO:70)
VIHVTKEVKEVATLSCGHNVSVEELAQTRIYWQKEKKMVLTMMSGDMNI
WPEYKNRTIFDITNNLSIVILALRPSDEGTYECVVLKYEKDAFKREHLA
EVTLSVKADXPTPSISDFEIPTSNIRRIICSTSGGFPEPHLSWLENGEE
LNAINTTVSQDPETELYAVSSKLDFNMTTNHSFMCLIKYGHLRVNQTFN
WNTTKQEHFPDN.

where X is any amino acid other than Phe. In some cases, X is Ala;

(SEQ ID NO:71)
VIHVTKEVKEVATLSCGHNVSVEELAQTRIYWQKEKKMVLTMMSGDMNI
WPEYKNRTIFDITNNLSIVILALRPSDEGTYECVVLKYEKDAFKREHLA
EVTLSVKADFPTPSISDFEIPTSNIRRIICSTSGGFPEPHLSWLENGEE
LNAINTTVXQDPETELYAVSSKLDFNMTTNHSFMCLIKYGHLRVNQTEN
WNTTKQEHFPDN.

where X is any amino acid other than Ser. In some cases, X is Ala; and

(SEQ ID NO:72)
VIHVTKEVKEVATLSCGHNVSVEELAQTRIYWQKEKKMVLTMMSGDMNI
WPEYKNRTIFDITNNLSIVILALRPSDEGTYECVVLKYEKDAFKREHLA
EVTLSVKADFPTXSISDFEIPTSNIRRIICSTSGGFPEPHLSWLENGEE
LNAINTTVSQDPETELYAVSSKLDFNMTTNHSFMCLIKYGHLRVNQTFN
WNTTKQEHFPDN.

where X is any amino acid other than Pro. In some cases, X is Ala.

### CD86 Variants

[0267] In some cases, a variant immunomodulatory polypeptide present in a TMMP of the present disclosure is a variant CD86 polypeptide. Wild-type CD86 binds to CD28. In some cases, where a TMMP of the present disclosure comprises a variant CD86 polypeptide, a “cognate co-immunomodulatory polypeptide” is a CD28 polypeptide comprising the amino acid sequence of SEQ ID NO:5.

[0268] The amino acid sequence of the full ectodomain of a wild-type human CD86 can be as follows:

(SEQ ID NO:8)
APLKIQAYFNETADLPCQFANSQNQSLSELVVFWQDQENLVLNEVYLGK
EKFDSVHSKYMNRTSFDSDSWTLRLHNLQIKDKGLYQCIIHHKKPTGMI
RIHQMNSELSVLANFSQPEIVPISNITENVYINLTCSSIHGYPEPKKMS
VLLRTKNSTIEYDGIMQKSQNVTELYDVSISLSVSFPDVTSNMTIFCIL
ETDKTRLLSSPFSIELEDPQPPPDHIP.

[0269] The amino acid sequence of the IgV domain of a wild-type human CD86 can be as follows:

(SEQ ID NO:9)
APLIQQAYFNETADLPCQFANSQNQSLSELVVFWQDQENLVLNEVYLGK
EKFDSVHSKYMNRTSFDSDSWTLRLHNLQIKDKGLYQCIIHHKKPTGMI
RIHQMNSELSVL.

[0270] In some cases, a variant CD86 polypeptide exhibits reduced binding affinity to CD28, compared to the binding affinity of a CD86 polypeptide comprising the amino acid sequence set forth in SEQ ID NO:8 or SEQ ID NO:9 for CD28. For example, in some cases, a variant CD86 polypeptide binds CD28 with a binding affinity that is at least 10%, at least 15%, at least 20%, at least 25%, at least 30%, at least 35%, at least 40%, at least 45%, at least 50% less, at least 55% less, at least 60% less, at least 65% less, at least 70% less, at least 75% less, at least 80% less, at least 85% less, at least 90% less, at least 95% less, or more than 95% less, than the binding affinity of a CD86 polypeptide comprising the amino acid sequence set forth in SEQ ID NO:8 or SEQ ID NO:9 for CD28 (e.g., a CD28 polypeptide comprising the amino acid sequence set forth in one of SEQ ID NO:5, 6, or 7).

[0271] In some cases, a variant CD86 polypeptide has a binding affinity to CD28 that is from 100 nM to 100 μM. As another example, in some cases, a variant CD86 polypeptide of the present disclosure has a binding affinity for CD28 (e.g., a CD28 polypeptide comprising the amino acid sequence set forth in one of SEQ ID NOs:5, 6, or 7) that is from about 100 nM to 150 nM, from about 150 nM to about 200 nM, from about 200 nM to about 250 nM, from about 250 nM to about 300 nM, from about 300 nM to about 350 nM, from about 350 nM to about 400 nM, from about 400 nM to about 500 nM, from about 500 nM to about 600 nM, from about 600 nM to about 700 nM, from about 700 nM to about 800 nM, from about 800 nM to about 900 nM, from about 900 nM to about 1 μM, to about 1 μM to about 5 μM, from about 5 μM to about 10 μM, from about 10 μM to about 15 μM, from about 15 μM to about 20 μM, from about 20 μM to about 25 μM, front about 25 μM to about 50 μM, from about 50 μM to about 75 μM, or from about 75 μM to about 100 μM.

[0272] In some cases, a variant CD86 polypeptide has a single amino acid substitution compared to the CD86 amino acid sequence set forth in SEQ ID NO:8. In some cases, a variant CD86 polypeptide has from 2 to 10 amino acid substitutions compared to the CD86 amino acid sequence set forth in SEQ ID NO:8. In some cases, a variant CD86 polypeptide has 2 amino acid substitutions compared to the CD86 amino acid sequence set forth in SEQ ID NO:8. In some cases, a variant CD86 polypeptide has 3 amino acid substitutions compared to the CD86 amino acid sequence set forth in SEQ ID NO:8. In some cases, a variant CD86 polypeptide has 4 amino acid substitutions compared to the CD86 amino acid sequence set forth in SEQ ID NO:8. In some cases, a variant CD86 polypeptide has 5 amino acid substitutions compared to the CD86 amino acid sequence set forth in SEQ ID NO:8. In some cases, a variant CD86 polypeptide has 6 amino acid substitutions compared to the CD86 amino acid sequence set forth in SEQ ID NO:8. In some cases, a variant CD86 polypeptide has 7 amino acid substitutions compared to the CD86 amino acid sequence set forth in SEQ ID NO:8. In some cases, a variant CD86 polypeptide has 8 amino acid substitutions compared to the CD86 amino acid sequence set forth in SEQ ID NO:8. In some cases, a variant CD86 polypeptide has 9 amino acid substitutions compared to the CD86 amino acid sequence set forth in SEQ ID NO:8. In some cases, a valiant CD86 polypeptide has 10 amino acid substitutions compared to the CD86 amino acid sequence set forth in SEQ ID NO:8.

[0273] In some cases, a variant CD86 polypeptide has a single amino acid substitution compared to the CD86 amino acid sequence set forth in SEQ ID NO:9. In some cases, a variant CD86 polypeptide has from 2 to 10 amino acid substitutions compared to the CD86 amino acid sequence set forth in SEQ ID NO:9. In some cases, a variant CD86 polypeptide has 2 amino acid substitutions compared to the CD86 amino acid sequence set forth in SEQ ID NO:9. In some cases, a variant CD86 polypeptide has 3 amino acid substitutions compared to the CD86 amino acid sequence set forth in SEQ ID NO:9. In some cases, a variant CD86 polypeptide has 4 amino acid substitutions compared to the CD86 amino acid sequence set forth in SEQ ID NO:9. In some cases, a variant CD86 polypeptide has 5 amino acid substitutions compared to the CD86 amino acid sequence set forth in SEQ ID NO:9. In some cases, a variant CD86 polypeptide has 6 amino acid substitutions compared to the CD86 amino acid sequence set forth in SEQ ID NO:9. In some cases, a variant CD86 polypeptide has 7 amino acid substitutions compared to the CD86 amino acid sequence set forth in SEQ ID NO:9. In some cases, a variant CD86 polypeptide has 8 amino acid substitutions compared to the CD86 amino acid sequence set forth in SEQ ID NO:9. In some cases, a variant CD86 polypeptide has 9 amino acid substitutions compared to the CD86 amino acid sequence set forth in SEQ ID NO:9. In some cases, a variant CD86 polypeptide has 10 amino acid substitutions compared to the CD86 amino acid sequence set forth in SEQ ID NO:9.

[0274] Suitable CD86 variants include a polypeptide that comprises an amino acid sequence having at least 90%, at least 95%, at least 98%, at least 99%, or 100%, amino acid sequence identity to any one of the following amino acid sequences:

(SEQ ID NO:73)
APLKIQAYFNETADLPCQFANSQNQSLSELVVFWQDQENLVLNEVYLGK
EKFDSVHSKYMXRTSFDSDSWTLRLHNLQIKDKGLYQCIIHHKKPTGMI
RIHQMNSELSVLANFSQPEIVPISNITENVYINLTCSSIHGYPEPKKMS
VLLRTKNSTIEYDGIMQKSQDNVTELYDVSISLSVSFPDVTSNMTIFCI
LETDKTRLLSSPFSIELEDPQPPPDHIP.

where X is any amino acid other than Asn. In some cases, X is Ala;

(SEQ ID NO:74)
APLKIQAYFNETADLPCQFANSQNQSLSELVVFWQDQENLVLNEVYLGK
EKFDSVHSKYMNRTSFXSDSWTLRLHNLQIKDKGLYQCIIHHKKPTGMI
RIHQMNSELSVLANFSQPEIVPISNITENVYINLTCSSIHGYPEPKKMS
VLLRTKNSTIEYDGIMQKSQDNVTELYDVSISLSVSFPDVTSNMTIFCI
LETDKTRLLSSPFSIELEDPQPPPDHIP.

where X is any amino acid other than Asp. In some cases, X is Ala;

(SEQ ID NO:75)
APLKIQAYFNETADLPCQFANSQNQSLSELVVFWQDQENLVLNEVYLGK
EKFDSVHSKYMNRTSFDSDSXTLRLHNLQIKDKGLYQCIIHHKKPTGMI
RIHQMNSELSVLANFSQPEIVPISNITENVYINLTCSSIHGYPEPKKMS
VLLRTKNSTIEYDGIMQKSQDNVTELYDVSISLSVSFPDVTSNMTIFCI
LETDKTRLLSSPFSIELEDPQPPPDHIP.

where X is any amino acid other than Trp. In some cases, X is Ala;

(SEQ ID NO:76)
APLKIQAYFNETADLPCQFANSQNQSLSELVVFWQDQENLVLNIEVYLG
KEKFDSVHSKYMNRTSFDSDSWTLRLHNLQIKDKGLYQCIIHXKKPTGM
IRIHQMNSELSVLANFSQPEIVPISNITENVYINLTCSSIHGYPEPKKM
SVLLRTKNSTIEYDGIMQKSQDNVTELYDVSISLSVSFPDVTSNMTIFC
ILETDKTRLLSSPFSIELEDPQPPPDHIP.

where X is any amino acid other than His. In some cases, X is Ala;

(SEQ ID NO:77)
APLKIQAYFNETADLPCQFANSQNQSLSELVVFWQDQENLVLNEVYLGK
EKFDSVHSKYMXRTSFDSDSWTLRLHNLQIKDKGLYQCIIHHKKPTGMI
RIHQMNSELSVL.

where X is any amino acid other than Asn. In some cases, X is Ala;

(SEQ ID NO:78)
APLKIQAYFNETADLPCQFANSQNQSLSELVVFWQDQENLVLNEVYLGK
EKFDSVHSKYMNRTSFXSDSWTLRLHNLQIKDKGLYQCITHHKKPTGMI
RIHQMNSELSVL.

where X is any amino acid other than Asp. In some cases, X is Ala;

(SEQ ID NO:79)
APLKIQAYFNETADLPCQFANSQNQSLSELVVFWQDQENLVLNEVYLGK
EKFDSVHSKYMNRTSFDSDSXTLRLHNLQIKDKGLYQCIIHHKKPTGMI
RIHQMNSELSVL.

where X is any amino acid other than Trp. In some cases, X is Ala;

(SEQ ID NO:80)
APLKIQAYFNETADLPCQFANSQNQSLSELVVFWQDQENLVLNEVYLGK
EKFDSVHSKYMNRTSFDSDSWTLRLHNLQIKDKGLYQCIIHXKKPTGMI
RIHQMNSELSVL.

where X is any amino acid other than His. In some cases, X is Ala;

(SEQ ID NO:81)
APLKIQAYFNETADLPCQFANSQNQSLSELVVFWQDQENLXLNEVYLGK
EKFDSVHSKYMNRTSFDSDSWTLRLHNLQIKDKGLYQCIIHHKKPTGMI
RIHQMNSELSVLANFSQPEIVPISNITENVYINLTCSSIHGYPEPKKSV
LLRTKNSTIEYDGIMQKSQDNVTELYDVSISLSVSFPDVTSNMTIFCIL
ETDKTRLLSSPFSIELEDPQPPPDHIP.

where X is any amino acid other than Val. In some cases, X is Ala;

(SEQ ID NO:82)
APLKQAYFNETADLPCQFANSQNQSLSELVVFWQDQENLXLNEVYLGKE
KFDSVHSKYMNRTSFDSDSWTLRLHNLQIKDKGLYQCIIHHKKPTGMIR
IHQMNSELSVL.

where X is any amino acid other than Val. In some cases, X is Ala;

(SEQ ID NO:83)
APLKIQAYFNETADLPCQFANSQNQSLSELVVFWXDQENLVLNEVYLGK
EKFDSVHSKYMNRTSFDSDSWTLRLHNLQIKDKGLYQCIIHHKKPTGMI
RIHQMNSELSVLANFSQPEIVPISNITENVYINLTCSSIHGYPEPKKMS
VLLRTNSTIEYDGIMQKSQDNVTELYDVSISLSVSFPDVTSNMTIFCIL
ETDKTRLLSSPFSIELEDPQPPPDHIP.

where X is any amino acid other than Gln. In some cases, X is Ala;

(SEQ ID NO:84)
APLKIQAYFNETADLPCQFANSQNQSLSELVVFWXDQENLVLNEVYLGK
EKFDSVHSKYMNRTSFDSDSWTLRLHNLQIKDKGLYQCIIHHKKPTGMI
RIHQMNSELSVL.

where X is any amino acid other than Gln. In some cases, X is Ala;

(SEQ ID NO:85)
APLKIQAYFNETADLPCQFANSQNQSLSELVVXWQDQENLVLNEVYLGK
EKFDSVHSKYMNRTSFDSDSWTLRLHNLQIKDKGLYQCIIHHKKPTGMI
RIHQMNSELSVLANFSQPEIVPISNITENVYINLTCSSIHGYPEPKKMS
VLLRTKNSTIEYDGIMQKSQDNVTELYDVSISLSVSFPDVTSNMTIFCI
LETDKTRLLSSPFSIELEDPQPPPDHIP.

where X is any amino acid other than Phe. In some cases, X is Ala;

(SEQ ID NO:86)
APLKIQAYFNETADLPCQFANSQNQSLSELVVXWQDQENLVLNEVYLGK
EKFDSVHSKYMNRTSFDSDSWTLRLHNLQIKDKGLYQCIIHHKKPTGMI
RIHQMNSELSVL.

where X is any amino acid other than Phe. In some cases, X is Ala;

(SEQ ID NO:87)
APLKIQAYFNETADLPCQFANSQNQSLSELVVFWQDQENLVLNEVYLGK
EKFDSVHSKYMNRTSFDSDSWTXRLHNLQIKDKGLYQCIIHHKKPTGMI
RIHQMNSELSVLANFSQPEIVPISNITENVYINLTCSSIHGYPEPKKMS
VLLRTKNSTIEYDGIMQKSQDNVTELYDVSISLSVSFPDVTSNMTIFCI
LETDKTRLLSSPFSIELEDPQPPDHIP.

where X is any amino acid other than Leu. In some cases, X is Ala;

(SEQ ID NO:88)
APLKIQAYFNETADLPCQFANSQNQSLSELVVFWQDQENLVLNEVYLGK
EKFDSVHSKYMNRTSFDSDSWTXRLHNLQIKDKGLYQCIIHHKKPTGMI
RIHQMNSELSVL.

where X is any amino acid other than Leu. In some cases, X is Ala;

(SEQ ID NO:89)
APLKIQAYFNETADLPCQFANSQNQSLSELVVFWQDQENLVLNEVYLGK
EKFDSVHSKXMNRTSFDSDSWTLRLHNLQIKDKGLYQCIIHHKKPTGMI
RIHQMNSELSVLANFSQPEIVPISNITENVYINLTCSSIHGYPEPKKMS
VLLRTKNSTIEYDGIMQKSQNVTELYDVSISLSVSFPDVTSNMTIFCIL
ETDKTRLLSSPFSIELEDPQPPPDHIP.

where X is any amino acid other than Tyr. In some cases, X is Ala;

(SEQ ID NO:90)
APLKIQAYFNETADLPCQFANSQNQSLSELVVFWQDQENLVLNEVYLGK
EKFDSVHSKXMNRTSFDSDSWTLRLHNLQIKDKGLYQCIIHHKKPTGMI
RIHQMNSELSVL.

where X is any amino acid other than Tyr. In some cases, X is Ala;

(SEQ ID NO:91)
APLKIQAYFNETADLPCQFANSQNQSLSELVVFWQDQENLVLNEVYLGK
EKFDSVHSKYMXRTSFDSDSWTLRLHNLQIKDKGLYQCIIHXKKPTGMI
RIHQMNSELSVLANFSQPEIVPISNITENVYINLTCSSIHGYPEPKKMS
VLLRTKNSTIEYDGIMQKSQDNVTELYDVSISLSVSFPDVTSNMTIFCI
LETDKTRLLSSPFSIELEDPQPPPDHIP.

where the first X is any amino acid other than Asn and the second X is any amino acid other than His. In some cases, the first and the second X are both Ala;

(SEQ ID NO:92)
APLKIQAYFNETADLPCQFANSQNQSLSELVVFWQDQENLVLNEVYLGK
EKFDSVHSKYMXRTSFDSDSWTLRLHNLQIKDKGLYQCIIHXKKPTGMI
RIHQMNSELSVL.

where the first X is any amino acid other than Asn and the second X is any amino acid other than His. In some cases, the first and the second X are both Ala;

(SEQ ID NO:93)
APLKIQAYFNETADLPCQFANSQNQSLSELVVFWQDQENLVLNEVYLGK
EKFDSVHSKYMNRTSFX₁SDSWTLRLHNLQIKDKGLYQCIIHX₂KKPTG
MIRIHQMNSELSVLANFSQPEIVPISNITENVYINLTCSSIHGYPEPKK
MSVLLRTKNSTIEYDGIMQKSQDNVTELYDVSISLSVSFPDVTSNMTIF
CILETDKTRLLSSPFSIELEDPQPPPDHIP.

where X₁ is any amino acid other than Asp, and X₂ is any amino acid other than His. In some cases, X₁ is Ala and X₂ is Ala;

(SEQ ID NO:94)
APLKIQAYFNETADLPCQFANSQNQSLSELVVFWQDQENLVLNEVYLGK
EKFDSVHSKYM

NRTSFX₁SDSWTLRLHNLQIKDKGLYQCIIHX₂KKPTGMIRIHQMNSE
LSVL.

where the first X is any amino acid other than Asn and the second X is any amino acid other than His. In some cases, the first and the second X are both Ala;

(SEQ ID NO:95)
APLKIQAYFNETADLPCQFANSQNQSLSELVVFWQDQENLVLNEVYLGK
EKFDSVHSKYMX₁RTSFX₂SDSWTLRLHNLQIKDKGLYQCIIHX₃KKPTG
MIRIHQMNSELSVLANFSQPEIVPISNITENVYINLICSSIHGYPEPKK
MSVLLRTKNSTIEYDGIMQKSQDNVTELYDVSISLSVSFPDVTSNMTIF
CILETDKTRLLSSPFSIELEDPQPPPDHIP.

where X₁ is any amino acid other than Asn, X₂ is any amino acid other than Asp, and X₃ is any amino acid other than His. In some cases, X₁ is Ala, X₂ is Ala, and X₃ is Ala; and

(SEQ ID NO:96)
APLKIQAYFNETADLPCQFANSQNQSLSELVVFWQDQENLVLNEVYLGK
EKFDSVHSKYMX₁RTSFX₂SDSWTLRLHNLQIKDKGLYQCIIHX₃KKPTG
MIRIHQMNSELSVL.

where X₁ is any amino acid other than Asn, X₂ is any amino acid other than Asp, and X₃ is any amino acid other than His. In some cases, X₁ is Ala, X₂ is Ala, and X₃ is Ala.

### 4-1BBL Variants

[0275] In some cases, a variant immunomodulatory polypeptide present in a TMMP of the present disclosure is a variant 4-1BBL polypeptide. Wild-type 4-1BBL binds to 4-1BB (CD137).

[0276] A wild-type 4-1BBL amino acid sequence can be as follows: MEYASDASLD

(SEQ ID NO:10)
PEAPWPPAPRARACRVLPWALVAGLLLLLLLAAACAVFLACPWAVSGAR
ASPGSAASPRLREGPELSPDDPAgLLDLRQGMFAQLVAQNVLLIDGPLS
WYSDPGLAGVSLTGGLSYKEDTKELVVAKAGVYYVFFQLELRRVVAGEG
SGSVSLALHLQPLRSAAGAAALALTVDLPPASSEARNSAFGFQGRLLHL
SAGQRLGVHLHTEARARHAWQLTQGATVIGLFRVTPEIPAGLPSPRSE.

[0277] In some cases, a variant 4-1BBL polypeptide is a variant of the tumor necrosis factor (TNF) homology domain (THD) of human 4-1BBL.

[0278] A wild-type amino acid sequence of the THD of human 4-1BBL can be, e.g., one of SEQ ID NOs:11-13, as follows:

(SEQ ID NO:11)
PAGLLDLRQGMFAQLVAQNVLLIDGPLSWYSDPGLAGVSLTGGLSYKED
TKELVVAKAGVYYVFFQLELRRVVAGEGSGSVSLALHLQPLRSAAGAAA
LALTVDLPPASSEARNSAFGFQGRLLHLSAGQRLGVHLHTEARARHAWQ
LTQGATVLGLFRVTPEIPAGLPSPRSE.

(SEQ ID NO:12)
DPAGLLDLRQGMFAQLVAQNVLLIDGPLSWYSDPGLAGVSLTGGLSYKE
DTKELVVAKAGVYYVFFQLELRRVVAGEGSGSVSLALHLQPLRSAAGAA
ALALTVDLPPASSEARNSAFGFQGRLLHLSAGQRLGVHLHTEARARHAW
QLTQGATVLGLFRVTPEIPAGLPSPRSE.

(SEQ ID NO:13)
DPAGLLDLRQGMFAQLVAQNVLLIDGPLSWYSDPGLAGVSLTGGLSYKE
DTKELVVAKAGVYYVFFQLELRRVVAGEGSGSVSLALHLQPLRSAAGAA
ALALTVDLPPASSEARNSAFGFQGRLLHLSAGQRLGVHLHTEARARHAW
QLTQGATVLGLFRVTPEIPA.

[0279] A wild-type 4-1BB amino acid sequence can be as follows:

(SEQ ID NO:14)
TLLVNLNFERTRSLQDPCSNCPAGTFCDNNRNQICSPCPPNSFSSAGGQ
RTCDICRQCKGVFRTRKECSSTSNAECDCTPGFHCLGAGCSMCEQDCKQ
GQELTKKGCKDCCFGTFNDQKRGICRPWTNCSLDGKSVLVNGTKERDVV
CGPSPADLSPGASSVTPPAPAREPGHSPQIISFFLALTSTALLFLLFFL
TLRFSVVKRGRKKLLYIFKQPFMRPVQTTQEEDGCSCRFPEEEECGCEL
.

In some cases, where a TMMP of the present disclosure comprises a variant 4-1BBL polypeptide, a “cognate co-immunomodulatory polypeptide” is a 4-1BB polypeptide comprising the amino acid sequence of SEQ ID NO:14.

[0280] In some cases, a variant 4-1BBL polypeptide exhibits reduced binding affinity to 4-1BB, compared to the binding affinity of a 4-1BBL polypeptide comprising the amino acid sequence set forth in one of SEQ ID NOs:10-13. For example, in some cases, a variant 4-1BBL polypeptide of the present disclosure binds 4-1BB with a binding affinity that is at least 10% less, at least 15% less, at least 20% less, at least 25%, at least 30% less, at least 35% less, at least 40% less, at least 45% less, at least 50% less, at least 55% less, at least 60% less, at least 65% less, at least 70% less, at least 75% less, at least 80% less, at least 85% less, at least 90% less, at least 95% less, or more than 95% less, than the binding affinity of a 4-1BBL polypeptide comprising the amino acid sequence set forth in one of SEQ ID NOs:10-13 for a 4-1BB polypeptide (e.g., a 4-1BB polypeptide comprising the amino acid sequence set forth in SEQ ID NO:14), when assayed under the same conditions.

[0281] In some cases, a variant 4-1BBL polypeptide has a binding affinity to 4-1BB that is from 100 nM to 100 μM. As another example, in some cases, a variant 4-1BBL polypeptide has a binding affinity for 4-1BB (e.g., a 4-1BB polypeptide comprising the amino acid sequence set forth in SEQ ID NO:14) that is from about 100 nM to 150 nM, from about 150 nM to about 200 nM, from about 200 nM to about 250 nM, from about 250 nM to about 300 nM, from about 300 nM to about 350 nM, from about 350 nM to about 400 nM, from about 400 nM to about 500 nM, from about 500 nM to about 600 nM, from about 600 nM to about 700 nM, from about 700 nM to about 800 nM, from about 800 nM to about 900 nM, from about 900 nM to about 1 μM, to about 1 μM to about 5 μM, from about 5 μM to about 10 μM, from about 10 μM to about 15 μM, from about 15 μM to about 20 μM, from about 20 μM to about 25 μM, from about 25 μM to about 50 μM, from about 50 μM to about 75 μM, or from about 75 μM to about 100 μM.

[0282] In some cases, a variant 4-1BBL polypeptide has a single amino acid substitution compared to the 4-1BBL amino acid sequence set forth in one of SEQ ID NOs:10-13. In some cases, a variant 4-1BBL polypeptide has from 2 to 10 amino acid substitutions compared to the 4-1BBL amino acid sequence set forth in one of SEQ ID NOs:10-13. In some cases, a variant 4-1BBL polypeptide has 2 amino acid substitutions compared to the 4-1BBL amino acid sequence set forth in one of SEQ ID NOs:10-13. In some cases, a variant 4-1BBL polypeptide has 3 amino acid substitutions compared to the 4-1BBL amino acid sequence set forth in one of SEQ ID NOs:10-13. In some cases, a variant 4-1BBL polypeptide has 4 amino acid substitutions compared to the 4-1BBL amino acid sequence set forth in one of SEQ ID NOs:10-13. In some cases, a variant 4-1BBL polypeptide has 5 amino acid substitutions compared to the 4-1BBL amino acid sequence set forth in one of SEQ ID NOs:10-13. In some cases, a variant 4-1BBL, polypeptide has 6 amino acid substitutions compared to the 4-1BBL amino acid sequence set forth in one of SEQ ID NOs:10-13. In some cases, a variant 4-1BBL polypeptide has 7 amino acid substitutions compared to the 4-1BBL amino acid sequence set forth in one of SEQ ID NOs:10-13. In some cases, a variant 4-1BBL polypeptide has 8 amino acid substitutions compared to the 4-1BBL amino acid sequence set forth in one of SEQ ID NOs:10-13. In some cases, a variant 4-1BBL polypeptide has 9 amino acid substitutions compared to the 4-1BBL amino acid sequence set forth in one of SEQ ID NOs:10-13. In some cases, a variant 4-1BBL polypeptide has 10 amino acid substitutions compared to the 4-1BBL amino acid sequence set forth in one of SEQ ID NOs:10-13.

[0283] Suitable 4-1BBL variants include a polypeptide that comprises an amino acid sequence having at least 90%, at least 95%, at least 98%, at least 99%, or 100%, amino acid sequence identity to any one of the following amino acid sequences:

(SEQ ID NO: 97)
PAGLLDLRQGMFAQLVAQNVLLIDGPLSWYSDPGLAGVSLTGGLSYXED
TKELVVAKAGVYYVFFQLELRRVVAGEGSGSVSLALHLQPLRSAAGAAA
LALTVDLPPASSEARNSAFGFQGRLLHLSAGQRLGVHLHTEARARHAWQ
LTQGATVLGLFRVTPEIPAGLPSPRSE.

where X is any amino acid other than Lys. In some cases, X is Ala;

(SEQ ID NO: 98)
PAGLLDLRQGMFAQLVAQNVLLIDGPLSWYSDPGLAGVSLTGGLSYKED
TKELVVAKAGVYYVFFQLELRRVVAGEGSGSVSLALHLQPLRSAAGAAA
LALTVDLPPASSEARNSAFGFQGRLLHLSAGQRLGVHLHTEARARHAWX
LTQGATVLGLFRVTPEIPAGLPSPRSE.

where X is any amino acid other than Gln. In some cases, X is Ala;

(SEQ ID NO: 99)
PAGLLDLRQGXFAQLVAQNVLLIDGPLSWYSDPGLAGVSLTGGLSYKED
TKELVVAKAGVYYVFFQLELRRVVAGEGSGSVSLALHLQPLRSAAGAAA
LALTVDLPPASSEARNSAFGFQGRLLHLSAGQRLGVHLHTEARARHAWQ
LTQGATVLGLFRVTPEIPAGLPSPRSE.

where X is any amino acid other than Met. In some cases, X is Ala;

(SEQ ID NO: 100)
PAGLLDLRQGMXAQLVAQNVLLIDGPLSWYSDPGLAGVSLTGGLSYKED
TKELVVAKAGVYYVFFQLELRRVVAGEGSGSVSLALHLQPLRSAAGAAA
LALTVDLPPASSEARNSAFGFQGRLLHLSAGQRLGVHLHTEARARHAWQ
LTQGATVLGLFRVTPEIPAGLPSPRSE.

where X is any amino acid other than Phe. In some cases, X is Ala;

(SEQ ID NO: 101)
PAGLLDLRQGMFAXLVAQNVLLIDGPLSWYSDPGLAGVSLTGGLSYKED
TKELVVAKAGVYYVFFQLELRRVVAGESSGSVSLALHLQPLRSAAGAAA
LALTVDLPPASSEARNSAFGFQGRLLHLSAGQRLGVHLHTEARARHAWQ
LTQGATVLGLERVTPEIPAGLPSPRSE.

where X is any amino acid other than Gln. In some cases, X is Ala;

(SEQ ID NO: 102)
PAGLLDLRQGMFAQXVAQNVLLIDGPLSWYSDPGLAGVSLTGGLSYKED
TKELVVAKAGVYYVFFQLELRRVVAGEGSGSVSLALHLQPLRSAAGAAA
LALTVDLPPASSEARNSAFGFQGRLLHLSAGQRLGVHLHTEARARHAWQ
LTQGATVLGLFRVTPEIPAGLPSPRSE.

where X is any amino acid other than Leu. In some cases, X is Ala;

(SEQ ID NO: 103)
PAGLLDLRQGMFAQLXAQNVLLIDGPLSWYSDPGLAGVSLTGGLSYKED
TKELVVAKAGVYYVFFQLELRRVVAGEGSGSVSLALHLQPLRSAAGAAA
LALTVDLPPASSEARNSAFGFQGRLLHLSAGQRLGVHLHTEARARHAWQ
LTQGATVLGLERVTPEIPAGLPSPRSE.

where X is any amino acid other than Val. In some cases, X is Ala;

(SEQ ID NO: 104)
PAGLLDLRQGMFAQLVAXNVLLIDGPLSWYSDPGLAGVSLTGGLSYKED
TKELVVAKAGVYYVFFQLELRRVVAGEGSGSVSLALHLQPLRSAAGAAA
LALTVDLPPASSEARNSAFGFQGRLLHLSAGQRLGVHLHTEARARHAWQ
LTQGATVLGLFRVTPEIPAGLPSPRSE.

where X is any amino acid other than Gln. In some cases, X is Ala;

(SEQ ID NO: 105)
PAGLLDLRQGMFAQLVAQXVLLIDGPLSWYSDPGLAGVSLTGGLSYKED
TKELVVAKAGVYYVFFQLELRRVVAGEGSGSVSLALHLQPLRSAAGAAA
LALTVDLPPASSEARNSAFGFQGRLLHLSAGQRLGVHLHTEARARHAWQ
LTQGATVLGLFRVTPEIPAGLPSPRSE.

where X is any amino acid other than Asn. In some cases, X is Ala;

(SEQ ID NO:106)
PAGLLDLRQGMFAQLVAQNXLLIDGPLSWYSDPGLAGVSLTGGLSYKED
TKELVVAKAGVYYVFFQLELRRVVAGEGSGSVSLALHLQPLRSAAGAAA
LALTVDLPPASSEARNSAFGFQGRLLHLSAGQRLGVHLHTEARARHAWQ
LTQGATVLGLFRVTPEIPAGLPSPRSE.

where X is any amino acid other than Val. In some cases, X is Ala;

(SEQ ID NO:107)
PAGLLDLRQGMFAQLVAQNVXLIDGPLSWYSDPGLAGVSLTGGLSYKED
TKELVVAKAGVYYVFFQLELRRVVAGEGSGSVSLALHLQPLRSAAGAAA
LALTVDLPPASSEARNSAFGEQGRLLHLSAGQRLGVHLHTEARARHAWQ
LTQGATVLGLFRVTPEIPAGLPSPRSE.

where X is any amino acid other than Leu. In some cases, X is Ala;

(SEQ ID NO:108)
PAGLLDLRQGMFAQLVAQNVLXIDGPLSWYSDPGLAGVSLTGGLSYKED
TKELVVAKAGVYYVFFQLELRRVVAGEGSGSVSLALHLQPLRSAAGAAA
LALTVDLPPASSEARNSAFGFQGRLLHLSAGQRLGVHLHTEARARHAWQ
LTQGATVLGLFRVTPEIPAGLPSPRSE.

where X is any amino acid other than Leu. In some cases, X is Ala;

(SEQ ID NO:109)
PAGLLDLRQGMFAQLVAQNVLLXDGPLSWYSDPGLAGVSLTGGLSYKED
TKELVVAKAGVYYVFFQLELRRVVAGEGSGSVSLALHLQPLRSAAGAAA
LALTVDLPPASSEARNSAFGFQGRLLHLSAGQRLGVHLHTEARARHAWQ
LTQGATVLGLFRVTPEIPAGLPSPRSE.

where X is any amino acid other than Ile. In some cases, X is Ala;

(SEQ ID NO:110)
PAGLLDLRQGMFAQLVAQNVLLIXGPLSWYSDPGLAGVSLTGGLSYKED
TKELVVAKAGVYYVFFQLELRRVVAGEGSGSVSLALHLQPLRSAAGAAA
LALTVDLPPASSEARNSAFGFQGRLLHLSAGQRLGVHLHTEARARHAWQ
LTQGATVLGLERVTPEIPAGLPSPRSE.

where X is any amino acid other than Asp. In some cases, X is Ala;

(SEQ ID NO:111)
PAGLLDLRQGMFAQLVAQNVLLIDXPLSWYSDPGLAGVSLTGGLSYKED
TKELVVAKAGVYYVFFQLELRRVVAGEGSGSVSLALHLQPLRSAAGAAA
LALTVDLPPASSEARNSAFGFQGRLLHLSAGQRLGVHLHTEARARHAWQ
LTQGATVLGLFRVTPEIPAGLPSPRSE.

where X is any amino acid other than Gly. In some cases, X is Ala;

(SEQ ID NO:112)
PAGLLDLRQGMFAQLVAQNVLLIGGXLSWYSDPGLAGVSLTGGLSYKED
TKELVVAKAGVYYVFFQLELRRVVAGEGSGSVSLALHLQPLRSAAGAAA
LALTVDLPPASSEARNSAFGFQGRLLHLSAGQRLGVHLHTEARARHAWQ
LTQGATVLGLFRVTPEIPAGLPSPRSE.

where X is any amino acid other than Pro. In some cases, X is Ala;

(SEQ ID NO:113)
PAGLLDLRQGMFAQLVAQNVLLIGGPXSWYSDPGLAGVSLTGGLSYKED
TKELVVAKAGVYYVFFQLELRRVVAGEGSGSVSLALHLQPLRSAAGAAA
LALTVDLPPASSEARNSAFGFQGRLLHLSAGQRLGVHLHTEARARHAWQ
LTQGATVLGLFRVTPEIPAGLPSPRSE.

where X is any amino acid other than Leu. In some cases, X is Ala;

(SEQ ID NO:114)
PAGLLDLRQGMFAQLVAQNVLLIGGPLXWYSDPGLAGVSLTGGLSYKED
TKELVVAKAGVYYVFFQLELRRVVAGEGSGSVSLALHLQPLRSAAGAAA
LALTVDLPPASSEARNSAFGFQGRLLHLSAGQRLGVHLHTEARARHAWQ
LTQGATVLGLFRVTPEIPAGLPSPRSE.

where X is any amino acid other than Ser. In some cases, X is Ala;

(SEQ ID NO:115)
PAGLLDLRQGMFAQLVAQNVLLIGGPLSXYSDPGLAGVSLTGGLSYKED
TKELVVAKAGVYYVFFQLELRRVVAGEGSGSVSLALHLQPLRSAAGAAA
LALTVDLPPASSEARNSAFGFQGRLLHLSAGQRLGVHLHTEARARHAWQ
LTQGATVLGLFRVTPEIPAGLPSPRSE.

where X is any amino acid other than Trp. In some cases, X is Ala;

(SEQ ID NO:116)
PAGLLDLRQGMFAQLVAQNVLLIGGPLSWXSDPGLAGVSLTGGLSYKED
TKELVVAKAGVYYVFFQLELRRVVAGEGSGSVSLALHLQPLRSAAGAAA
LALTVDLPPASSEARNSAFGFQGRLLHLSAGQRLGVHLHTEARARHAWQ
LTQGATVLGLFRVTPEIPAGLPSPRSE.

where X is any amino acid other than Tyr. In some cases, X is Ala;

(SEQ ID NO:117)
PAGLLDLRQGMFAQLVAQNVLLIGGPLSWYXDPGLAGVSLTGGLSYKED
TKELVVAKAGVYYVFFQLELRRVVAGEGSGSVSLALHLQPLRSAAGAAA
LALTVDLPPASSEARNSAFGFQGRLLHLSAGQRLGVHLHTEARARHAWQ
LTQGATVLGLFRVTPEIPAGLPSPRSE.

where X is any amino acid other than Ser. In some cases, X is Ala;

(SEQ ID NO:118)
PAGLLDLRQGMFAQLVAQNVLLIGGPLSWYSXPGLAGVSLTGGLSYKED
TKELVVAKAGVYYVFFQLELRRVVAGEGSGSVSLALHLQPLRSAAGAAA
LALTVDLPPASSEARNSAFGFQGRLLHLSAGQRLGVHLHTEARARHAWQ
LTQGATVLGLFRVTPEIPAGLPSPRSE.

where X is any amino acid other than Asp. In some cases, X is Ala;

(SEQ ID NO:119)
PAGLLDLRQGMFAQLVAQNVLLIGGPLSWYSDXGLAGVSLTGGLSYKED
TKELVVAKAGVYYVFFQLELRRVVAGEGSGSVSLALHLQPLRSAAGAAA
LALTVDLPPASSEARNSAFGFQGRLLHLSAGQRLGVHLHTEARARHAWQ
LTQGATVLGLFRVTPEIPAGLPSPRSE.

where X is any amino acid other than Pro. In some cases, X is Ala;

(SEQ ID NO:120)
PAGLLDLRQGMFAQLVAQNVLLIGGPLSWYSDPXLAGVSLTGGLSYKED
TKELVVAKAGVYYVEFQLELRRVVAGEGSGSVSLALHLQPLRSAAGAAA
LALTVDLPPASSEARNSAFGFQGRLLHLSAGQRLGVHLHTEARARHAWQ
LTQGATVLGLERVTPEIPAGLPSPRSE.

where X is any amino acid other than Gly. In some cases, X is Ala;

(SEQ ID NO:121)
PAGLLDLRQGMFAQLVAQNVLLIGGPLSWYSDPGXAGVSLTGGLSYKED
TKELVVAKAGVYYVFFQLELRRVVAGEGSGSVSLALHLQPLRSAAGAAA
LALTVDLPPASSEARNSAFGFQGRLLHLSAGQRLGVHLHTEARARHAWQ
LTQGATVLGLFRVTPEIPAGLPSPRSE.

where X is any amino acid other than Leu. In some cases, X is Ala;

(SEQ ID NO:122)
PAGLLDLRQGMFAQLVAQNVLLIGGPLSWYSDPGLAXVSLTGGLSYKED
TKELVVAKAGVYYVFFQLELRRVVAGEGSGSVSLALHLQPLRSAAGAAA
LALTVDLPPASSEARNSAFGFQGRLLHLSAGQRLGVHLHTEARARHAWQ
LTQGATVLGLFRVTPEIPAGLPSPRSE.

where X is any amino acid other than Gly. In some cases, X is Ala;

(SEQ ID NO:123)
PAGLLDLRQGMFAQLVAQNVLLIGGPLSWYSDPGLAGXSLTGGLSYKED
TKELVVAKAGVYYVITQLELRRVVAGEGSGSVSLALHLQPLRSAAGAAA
LALTVDLPPASSEARNSAFGFQGRLLHLSAGQRLGVHLHTEARARHAWQ
LTQGATVLGLFRVTPEIPAGLPSPRSE.

where X is any amino acid other than Val. In some cases, X is Ala;

(SEQ ID NO:124)
PAGLLDLRQGMFAQLVAQNVLLIGGPLSWYSDPGLAGVXLTGGLSYKED
TKELVVAKAGVYYVFFQLELRRVVAGEGSGSVSLALHLQPLRSAAGAAA
LALTVDLPPASSEARNSAFGFQGRLLHLSAGQRLGVHLHTEARARHAWQ
LTQGATVLGLFRVTPEIPAGLPSPRSE.

where X is any amino acid other than Ser. In some cases, X is Ala;

(SEQ ID NO:125)
PAGLLDLRQGMFAQLVAQNVLLIGGPLSWYSDPGLAGVSXTGGLSYKED
TKELVVAKAGVYYVFFQLELRRVVAGEGSGSVSLALHLQPLRSAAGAAA
LALTVDLPPASSEARNSAFGFQGRLLHLSAGQRLGVHLHTEARARHAWQ
LTQGATVIGLERVTPEIPAGLPSPRSE.

where X is any amino acid other than Leu. In some cases, X is Ala;

(SEQ ID NO:126)
PAGLLDLRQGMFAQLVAQNVLLIGGPLSWYSDPGLAGVSLXGGLSYKED
TKELVVAKAGVYYVFFQLELRRVVAGEGSGSVSLALHLQPLRSAAGAAA
LALTVDLPPASSEARNSAFGFQGRLLHLSAGQRLGVHLHTEARARHAWQ
LTQGATVLGLFRVTPEIPAGLPSPRSE.

where X is any amino acid other than Thr. In some cases, X is Ala;

(SEQ ID NO:127)
PAGLLDLRQGMFAQLVAQNVLLIGGPLSWYSDPGLAGVSLTXGLSYKED
TKELVVAKAGVYYVFFQLELRRVVAGEGSGSVSLALHLQPLRSAAGAAA
LALTVDLPPASSEARNSAFGFQGRLLHLSAGQRLGVHLHTEARARHAWQ
LTQGATVLGLFRVTPEIPAGLPSPRSE.

where X is any amino acid other than Gly. In some cases, X is Ala;

(SEQ ID NO:128)
PAGLLDLRQGMFAQLVAQNVLLIGGPLSWYSDPGLAGVSLTGXLSYKED
TKELVVAKAGVYYVFFQLELRRVVAGEGSGSVSLALHLQPLRSAAGAAA
LALTVDLPPASSEARNSAFGFQGRLLHLSAGQRLGVHLHTEARARHAWQ
LTQGATVLGLFRVTPEIPAGLPSPRSE.

where X is any amino acid other than Gly. In some cases, X is Ala;

(SEQ ID NO:129)
PAGLLDLRQGMFAQLVAQNVLLIGGPLSWYSDPGLAGVSLTGGXSYKED
TKELVVAKAGVYYVFFQLELRRVVAGEGSGSVSLALHLQPLRSAAGAAA
LALTVDLPPASSEARNSAFGFQGRLLHLSAGQRLGVHLHTEARARHAWQ
LTQGATVLGLFRVTPEIPAGLPSPRSE.

where X is any amino acid other than Leu. In some cases, X is Ala;

(SEQ ID NO:130)
PAGLLDLRQGMFAQLVAQNVLLIGGPLSWYSDPGLAGVSLTGGLXYKED
TKELVVAKAGVYYVFFQLELRRVVAGEGSGSVSLALHLQPLRSAAGAAA
LALTVDLPPASSEARNSAFGFQGRLLHLSAGQRLGVHLHTEARARHAWQ
LTQGATVLGLFRVTPEIPAGLPSPRSE.

where X is any amino acid other than Ser. In some cases, X is Ala;

(SEQ ID NO:131)
PAGLLDLRQGMFAQLVAQNVLLIGGPLSWYSDPGLAGVSLTGGLSXKED
TKELVVAKAGVYYVFFQLELRRVVAGEGSGSVSLALHLQPLRSAAGAAA
LALTVDLPPASSEARNSAFGFQGRLLHLSAGQRLGVHLHTEARARHAWQ
LTQGATVLGLFRVTPEIPAGLPSPRSE.

where X is any amino acid other than Tyr. In some cases, X is Ala;

(SEQ ID NO:132)
PAGLLDLRQGMFAQLVAQNVLLIGGPLSWYSDPGLAGVSLTGGLSYKXD
TKELVVAKAGVYYVFFQLELRRVVAGEGSGSVSLALHLQPLRSAAGAAA
LALTVDLPPASSEARNSAFGFQGRLLHLSAGQRLGVHLHTEARARHAWQ
LTQGATVLGLFRVTPEIPAGLPSPRSE.

where X is any amino acid other than Glu. In some cases, X is Ala;

(SEQ ID NO:133)
PAGLLDLRQGMFAQLVAQNVLLIGGPLSWYSDPGLAGVSLTGGLSYKEX
TKELVVAKAGVYYVFFQLELRRVVAGEGSGSVSLALHLQPLRSAAGAAA
LALTVDLPPASSEARNSAFGFQGRLLHLSAGQRLGVHLHTEARARHAWQ
LTQGATVLGLFRVTPEIPAGLPSPRSE.

where X is any amino acid other than Asp. In some cases, X is Ala;

(SEQ ID NO:134)
PAGLLDLRQGMFAQLVAQNVLLIGGPLSWYSDPGLAGVSLTGGLSYKED
XKELVVAKAGVYYVFFQLELRRVVAGEGSGSVSLALHLQPLRSAAGAAA
LALTVDLPPASSEARNSAFGFQGRLLHLSAGQRLGVHLHTEARARHAWQ
LTQGATVLGLFRVTPEIPAGLPSPRSE.

where X is any amino acid other than Thr. In some cases, X is Ala;

(SEQ ID NO:135)
PAGLLDLRQGMFAQLVAQNVLLIGGPLSWYSDPGLAGVSLTGGLSYKED
TXELVVAKAGVYYVFFQLELRRVVAGEGSGSVSLALHLQPLRSAAGAAA
LALTVDLPPASSEARNSAFGFQGRLLHLSAGQRLGVHLHTEARARHAWQ
LTQGATVLGLFRVTPEIPAGLPSERSE.

where X is any amino acid other than Lys. In some cases, X is Ala;

(SEQ ID NO:136)
PAGLLDLRQGMFAQLVAQNVLLIGGPLSWYSDPGLAGVSLTGGLSYKED
TKXLVVAKAGVYYVFFQLELRRVVAGEGSGSVSLALHLQPLRSAAGAAA
LALTVDLPPASSEARNSAFGFQGRLLHLSAGQRLGVHLHTEARARHAWQ
LTQGATVLGLFRVTPEIPAGLPSPRSE.

where X is any amino acid other than Glu. In some cases, X is Ala;

(SEQ ID NO:137)
PAGLLDLRQGMFAQLVAQNVLLIGGPLSWYSDPGLAGVSLTGGLSYKED
TKELVVAKAGVYYVXQLELRRVVAGEGSGSVSLAFLHLQPLRSAAGAAA
LALTVDLPPASSEARNSAFGFQGRLLHLSAGQRLGVHLHTEARARHAWQ

| | |
|---|---|
| LTQGATVLGLFR | VTPEIPAGLPSPRSE. |

where X is any amino acid other than Phe. In some cases, X is Ala;

(SEQ ID NO:138)
PAGLLDLRQGMFAQLVAQNVLLIGGPLSWYSDPGLAGVSLTGGLSYKED
TKELVVAKAGVYYVFXQLELRRVVAGEGSGSVSLALHLQPLRSAAGAAA
LALTVDLPPASSEARNSAFGFQGRLLHLSAGQRLGVHLHTEARARHAWQ
LTQGATVLGLFRVTPEIPAGLPSPRSE.

where X is any amino acid other than Phe. In some cases, X is Ala;

(SEQ ID NO:139)
PAGLLDLRQGMFAQLVAQNVLLIGGPLSWYSDPGLAGVSLTGGLSYKED
TKELVVAKAGVYYVFFXLELRRVVAGEGSGSVSLALHLQPLRSAAGAAA
LALTVDLPPASSEARNSAFGFQGRLLHLSAGQRLGVHLHTEARARHAWQ
LTQGATVLGLFRVTPEIPAGLPSPRSE.

where X is any amino acid other than Gln. In some cases, X is Ala;

(SEQ ID NO:140)
PAGLLDLRQGMFAQLVAQNVLLIGGPLSWYSDPGLAGVSLTGGLSYKED
TKELVVAKAGVYYFFQXELRRVVAGEGSCISVSLALHLQPLRSAAGAAA
LALTVDLPPASSEARNSAFGFQGRLLHLSAGQRLGVHLHTEARARHAWQ
LTQGATVLGLFRVTPEIPAGLPSPRSE.

where X is any amino acid other than Leu. In some cases, X is Ala;

(SEQ ID NO:141)
PAGLLDLRQGMFAQLVAQNVLLIGGPLSWYSDPGLAGVSLTGGLSYKED
TKELVVAKAGVYYVFFQLXLRRVVAGEGSGSVSLALHLQPLRSAAGAAA
LALTVDLPPASSEARNSAFGFQGRLLHLSAGQRLGVHLHTEARARHAWQ
LTQGATVLGLFRVTPEIPAGLPSPRSE.

where X is any amino acid other than Glu. In some cases, X is Ala;

(SEQ ID NO:142)
PAGLLDLRQGMFAQLVAQNVLLIGGPLSWYSDPGLAGVSLTGGLSYKED
TKELVVAKAGVYYVFFQLEXRRVVAGEGSGSVSLALHLQPLRSAAGAAA
LALTVDLPPASSEARNSAFGFQGRLLHLSAGQRLGVHLHTEARARHAWQ
LTQGATVLGLFRVTPEIPAGLPSPRSE.

where X is any amino acid other than Leu. In some cases, X is Ala;

(SEQ ID NO:143)
PAGLLDLRQGMFAQLVAQNVLLIGGPLSWYSDPGLAGVSLTGGLSYKED
TKELVVAKAGVYYVFFQLELXRVVAGEGSGSVSLALHLQPLRSAAGAAA
LALTVDLPPASSEARNSAFGFQGRLLHLSAGQRLGVHLHTEARARHAWQ
LTQGATVLGLFRVTPEIPAGLPSPRSE.

where X is any amino acid other than Arg. In some cases, X is Ala;

(SEQ ID NO:144)
PAGLLDLRQGMFAQLVAQNVLLIGGPLSWYSDPGLAGVSLTGGLSYKED
TKELVVAKAGVYYVFFQLELRXVVAGEGSGSVSLALHLQPLRSAAGAAA
LALTVDLPPASSEARNSAFGFQGRLLHLSAGQRLGVHLHTEARARHAWQ
LTQGATVLGLERVTPEIPAGLPSPRSE.

where X is any amino acid other than Arg. In some cases, X is Ala;

(SEQ ID NO:145)
PAGLLDLRQGMFAQLVAQNVLLIGGPLSWYSDPGLAGVSLTGGLSYKED
TKELVVAKAGVYYVFFQLELRRXVAGEGSGSVSLALHLQPLRSAAGAAA
LALTVDLPPASSEARNSAFGFQGRLLHLSAGQRLGVHLHTEARARHAWQ
LTQGATVLGLFRVTPEIPAGLPSPRSE.

where X is any amino acid other than Val. In some cases, X is Ala;

(SEQ ID NO:146)
PAGLLDLRQGMFAQLVAQNVLLIGGPLSWYSDPGLAGVSLTGGLSYKED
TKELVVAKAGVYYVFFQLELRRVXAGEGSGSVSLALHLQPLRSAAGAAA
LALTVDLPPASSEARNSAFGFQGRLLHLSAGQRLGVHLHTEARARHAWQ
LTQGATVLGLFRVTPEIPAGLPSPRSE.

where X is any amino acid other than Val. In some cases, X is Ala;

(SEQ ID NO:147)
PAGLLDLRQGMFAQLVAQNVLLIGGPLSWYSDPGLAGVSLTGGLSYKED
TKELVVAKAGVYYVFFQLELRRVVAXEGSGSVSLALHLQPLRSAAGAAA
LALTVDLPPASSEARNSAFGFQGRLLHLSAGQRLGVHLHTEARARHAWQ
LTQGATVLGLFRVTPEIPAGLPSPRSE.

where X is any amino acid other than Gly. In some cases, X is Ala;

(SEQ ID NO:148)
PAGLLDLRQGMFAQLVAQNVLLIGGPLSWYSDPGLAGVSLTGGLSYKED
TKELVVAKAGVYYVFFQLELRRVVAGXGSGSVSLALHLQPLRSAAGAAA
LALTVDLPPASSEARNSAFGFQGRLLHLSAGQRLGVHLHTEARARHAWQ
LTQGATVLGLFRVTPEIPAGLPSPRSE.

where X is any amino acid other than Glu. In some cases, X is Ala;

(SEQ ID NO:149)
PAGLLDLRQGMFAQLVAQNVLLIGGPLSWYSDPGLAGVSLTGGLSYKED
TKELVVAKAGVYYVFFQLELRRVVAGEXSGSVSLALHLQPLRSAAGAAA
LALTVDLPPASSEARNSAFGFQGRLLHLSAGQRLGVHLHTEARARHAWQ
LTQGATVLGLFRVTPEIPAGLPSPRSE.

where X is any amino acid other than Gly. In some cases, X is Ala;

(SEQ ID NO:150)
PAGLLDLRQGMFAQLVAQNVLLIGGPLSWYSDPGLAGVSLTGGLSYKED
TKELVVAKAGVYYVFFQLELRRVVAGEGXGSVSLALHLQPLRSAAGAAA
LALTVDLPPASSEARNSAFGFQGRLLHLSAGQRLGVHLHTEARARHAWQ
LTQGATVLGLFRVTPEIPAGLPSPRSE.

where X is any amino acid other than Ser. In some cases, X is Ala;

(SEQ ID NO:151)
PAGLLDLRQGMFAQLVAQNVLLIGGPLSWYSDPGLAGVSLTGGLSYKED
TKELVVAKAGVYYVFFQLELRRVVAGEGSGSVSLALHLQPLRSAAGAAA
LALTVXLPPASSEARNSAFGFQGRLLHLSAGQRLGVHLHTEARARHAWQ
LTQGATVLGLFRVTPEIPAGLPSPRSE.

where X is ally amino acid other than Asp. In some cases, X is Ala;

(SEQ ID NO:152)
PAGLLDLRQGMFAQLVAQNVLLIGGPLSWYSDPGLAGVSLTGGLSYKED
TKELVVAKAGVYYVETQLELRRVVAGEGSGSVSLALHLQPLRSAAGAAA
LALTVDXPPASSEARNSAFGFQGRLLHLSAGQRLGVHLHTEARARHAWQ
LTQGATVLGLFRVTPEIPAGLPSPRSE.

where X is any amino acid other than Leu. In some cases, X is Ala;

(SEQ ID NO:153)
PAGLLDLRQGMFAQLVAQNVLLIGGPLSWYSDPGLAGVSLTOGLSYKED
TKELVVAKAGVYYVFFQLELRRVVAGEGSGSVSLALHLQPLRSAAGAAA
LALTVDLXPASSEARNSAFGFQGRLLHLSAGQRLGVHLHTEARARHAWQ
LTQGATVLGLFRVTPEIPAGLPSPRSE.

where X is any amino acid other than Pro. In some cases, X is Ala;

(SEQ ID NO:154)
PAGLLDLRQGMFAQLVAQNVLLIGGPLSWYSDPGLAGVSLTGGLSYKED
TKELVVAKAGVYYVEFQLELRRVVAGEGSGSVSLALHLQPLRSAAGAAA
LALTVDLPPAXSEARNSAFGFQGRLLHLSAGQRLGVHLHTEARARHAWQ
LTQGATVLGLFRVTPEIPAGLPSPRSE.

where X is any amino acid other than Ser. In some cases, X is Ala;

(SEQ ID NO:155)
PAGLLDLRQGMFAQLVAQNVLLIGGPLSWYSDPGLAGVSLTGGLSYKED
TKELVVAKAGVYYVFFQLELRRVVAGEGSGSVSLALHLQPLRSAAGAAA
LALTVDLPPASXEARNSAFGFQGRLLHLSAGQRLGVHLHTEARARHAWQ
LTQGATVLGLFRVTPEIPAGLPSPRSE.

where X is any amino acid other than Ser. In some cases, X is Ala;

(SEQ ID NO:156)
PAGLLDLRQGMFAQLVAQNVLLIGGPLSWYSDPGLAGVSLTGGLSYKED
TKELVVAKAGVYYVFFQLELRRVVAGEGSGSVSLALHLQPLRSAAGAAA
LALTVDLPPASSXARNSAFGFQGRLLHLSAGQRLGVHLHTEARARHAWQ
LTQGATVLGLERVTPEIPAGLPSPRSE.

where X is any amino acid other than Gln. In some cases, X is Ala;

(SEQ ID NO:157)
PAGLLDLRQGMFAQLVAQNVLL1GGPLSWYSDPGLAGVSLTGGLSYKED
TKELVVAKAGVYYVFFQLELRRVVAGEGSGSVSLALHLQPLRSAAGAAA
LALTVDLPPASSEAXNSAFGFQGRLLFILSAGQRLGVHLHTEARARHAW
QLTQGATVLGLFRVTPEIPAGLPSPRSE.

where X is any amino acid other than Arg. In some cases, X is Ala;

(SEQ ID NO:158)
PAGLLDLRQGMFAQLVAQNVLLIGGPLSWYSDPGLAGVSLTGGLSYKED
TKELVVAKAGVYYVFFQLELRRVVAGEGSGSVSLALHLQPLRSAAGAAA
LALTVDLPPASSEARXSAFGFQGRLLHLSAGQRLGVHLHTEARARHAWQ
LTQGATVLGLFRVTPEIPAGLPSPRSE.

where X is any amino acid other than Asn. In some cases, X is Ala;

(SEQ ID NO:159)
PAGLLDLRQGMFAQLVAQNVLLIGGPLSWYSDPGLAGVSLTGGLSYKED
TKELVVAKAGVYYVFFQLELRRVVAGEGSGSVSLALHLQPLRSAAGAAA
LALTVDLPPASSEARNXAFGFQGRLLFILSAGQRLGVFILHTEARARHA
WQLTQGATVLGLERVTPEIPAGLPSPRSE.

where X is any amino acid other than Ser. In some cases, X is Ala;

(SEQ ID NO:160)
PAGLLDLRQGMFAQLVAQNVLLIGGPLSWYSDPGLAGVSLTGGLSYKED
TKELVVAKAGVYYVFFQLELRRVVAGEGSGSVSLALHLQPLRSAAGAAA
LALTVDLPPASSEARNSAXGFQGRLLHLSAGQRLGVHLHTEARARHAWQ
LTQGATVLGLFRVTPEIPAGLPSPRSE.

where X is any amino acid other than Phe. In some cases, X is Ala;

(SEQ ID NO:161)
PAGLLDLRQGMFAQLVAQNVLLIGGPLSWYSDPGLAGVSLTGGLSYKED
TKELVVAKAGVYYVITQLELRRVVAGEGSGSVSLALHLQPLRSAAGAAA
LALTVDLPPASSEARNSAFGFQGRLLHLSAGXRLGVHLHTEARARHAWQ
LTQGATVLGLFRVTPEIPAGLPSPRSE.

where X is any amino acid other than Gln. In some cases, X is Ala;

(SEQ ID NO:162)
PAGLLDLRQGMFAQLVAQNVLLIGGPLSWYSDPGLAGVSLTGGLSYKED
TKELVVAKAGVYYVFFQLELRRVVAGEGSGSVSLALHLQPLRSAAGAAA
LALTVDLPPASSEARNSAFGFQFRLLHLSAGQXLGVHLHTEARARHAWQ
LTQGATVLGLERVTPEIPAGLPSPRSE.

where X is any amino acid other than Arg. In some cases, X is Ala;

(SEQ ID NO:163)
PAGLLDLRQGMFAQLVAQNVLLIGGPLSWYSDPGLAGVSLTGGLSYKED
TKELVVAKAGVYYVFFQLELRRVVAGEGSGSVSLALHLQPLRSAAGAAA
LALTVDLPPASSEARNSAFGFQGRLLHLSAGQRXGVHLHTEARARHAWQ
LTQGATVLGLFRVTPEIPAGLPSPRSE.

where X is any amino acid other than Leu. In some cases, X is Ala;

(SEQ ID NO:164)
PAGLLDLRQGMFAQLVAQNVLLIGGPLSWYSDPGLAGVSLTGGLSYKED
TKELVVAKAGVYYVFFQLELRRVVAGEGSGSVSLALHLQPLRSAAGAAA
LALTVDLPPASSEARNSAFGFQGRLLHLSAGQRLXVHLHTEARARHAWQ
LTQGATVLGLFRVTPEIPAGLPSPRSE.

where X is any amino acid other than Gly. In some cases, X is Ala;

(SEQ ID NO:165)
PAGLLDLRQGMFAQLVAQNVLLIGCPLSWYSDPGLAGVSLTGGLSYKED
TKELVVAKAGVYYVFFQLELRRVVAGEGSGSVSLALHLQPLRSAAGAAA
LALTVDLPPASSEARNSAFGFQGRLLHLSAGQRLGXHLHTEARARHAWQ
LTQGATVLGLFRVTPEIPAGLPSPRSE.

where X is any amino acid other than Val. In some cases, X is Ala;

(SEQ. ID NO:166)
PAGLLDLRQGMFAQLVAQNVLLIGGPLSWYSDPGLAGVSLTGGLSYKED
TKELVVAKAGVYYVFFQLELRRVVAGEGSGSVSLALHLQPLRSAAGAAA
LALTVDLPPASSEARNSAFGFQGRLLHLSAGQRLGVXLHTEARARHAWQ
LTQGATVLOLFRVTPEIPAGLPSPRSE.

where X is any amino acid other than His. In some cases, X is Ala;

(SEQ ID NO:167)
PAGLLDLRQGMFAQLVAQNVLLIGGPLSWYSDPGLAGVSLTGGLSYKED
TKELVVAKAGVYYVFFQLELRRVVAGEGSGSVSLALHLQPLRSAAGAAA
LALTVDLPPASSEARNSAFGFQGRLLHLSAGQRLGVHXHTEARARHAWQ
LTQGATVLGLFRVTPEIPAGLPSPRSE.

where X is any amino acid other than Leu. In some cases, X is Ala;

(SEQ ID NO:168)
PAGLLDLRQGMFAQLVAQNVLLIGGPLSWYSDPGLAGVSLTGGLSYKED
TKELVVAKAGVYYVFFQLELRRVVAGEGSGSVSLALHLQPLRSAAGAAA
LALTVDLPPASSEARNSAFGFOGRLLHLSAGQRLGVHLXTEARARHAWQ
LTQGATVLGLFRVTPEIPAGLPSPRSE.

where X is any amino acid other than His. In some cases, X is Ala;

(SEQ ID NO:169)
PAGLLDLRQGMFAQLVAQNVLLIGGPLSWYSDPGLAGVSLTGGLSYKED
TKELVVAKAGVYYVITQLELRRVVAGEGSGSVSLALHLQPLRSAAGAAA
LALTVDLPPASSEARNSAFGFQGRLLHLSAGQRLGVHLHXEARARHAWQ
LTQGATVLGLFRVTPEIPAGLPSPRSE.

where X is any amino acid other than Thr. In some cases, X is Ala;

(SEQ ID NO:170)
PAGLLDLRQGMFAQLVAQNVLLIGGPLSWYSDPGLAGVSLTGGLSYKED
TKELVVAKAGVYYVITQLELRRVVAGEGSGSVSLALHLQPLRSAAGAAA
LALTVDLPPASSEARNSAFGFQGRLLHLSAGQRLGVICHTXARARHAWQ
LTQGATVLGLFRVTPEIPAGLPSPRSE.

where X is any amino acid other than Glu. In some cases, X is Ala;

(SEQ ID NO:171)
PAGLLDLRQGMFAQLVAQNVLLIGGPLSWYSDPGLAGVSLTGGLSYKED
TKELVVAKAGVYYVFFQLELRRVVAGEGSGSVSLALHLQPLRSAAGAAA
LALTVDLPPASSEARNSAFGFQGRLLHLSAGQRLGVHLHTEAXARHAWQ
LTQGATVLGLFRVTPEIPAGLPSPRSE.

where X is any amino acid other than Arg. In some cases, X is Ala;

(SEQ ID NO:172)
PAGLLDLRQGMFAQLVAQNVLLIGGPLSWYSDPGLAGVSLTGGLSYKED
TKELVVAKAGVYYVFFQLELRRVVAGEGSGSVSLALHLQPLRSAAGAAA
LALTVDLPPASSEARNSAFGFQGRLLHLSAGQRLGVHLHTEARAXHAWQ
LTQGATVLGLFRVTPEIPAGLPSPRSE.

where X is any amino acid other than Arg. In some cases, X is Ala;

(SEQ ID NO:173)
PAGLLDLRQGMFAQLVAQNVLLIGGPLSWYSDPGLAGVSLTGGLSYKED
TKELVVAKAGVYYVFFQLELRRVVAGEGSGSVSLALHLQPLRSAAGAAA
LALTVDLPPASSEARNSAFGFQGRLLHLSAGQRLGVHLHTEARARXAWQ
LTQGATVLGLFRVTPEIPAGLPSPRSE.

where X is any amino acid other than His. In some cases, X is Ala;

(SEQ ID NO:174)
PAGLLDLRQGMFAQLVAQNVLLIGGPLSWYSDPGLAGVSLTGGLSYKED
TKELVVAKAGVYYVITQLELRRVVAGEGSGSVSLALHLQPLRSAAGAAA
LALTVDLPPASSEARNSAFGFQGRLLHLSAGQRLGVHLHTEARARHAXQ
LTQGATVLGLFRVTPEIPAGLPSPRSE.

where X is any amino acid other than Trp. In some cases, X is Ala;

(SEQ ID NO:175)
PAGLLDLRQGMFAQLVAQNVLLIGGPLSWYSDPGLAGVSLTGGLSYKED
TKELVVAKAGVYYVFFQLELRRVVAGEGSGSVSLALHLQPLRSAAGAAA
LALTVDLPPASSEARNSAFGFQGRLLHLSAGQRLGVHLHTEARARHAWQ
XTQGATVLGLFRVTPEIPAGLPSPRSE.

where X is any amino acid other than Leu. In some cases, X is Ala;

(SEQ ID NO:176)
PAGLLDLRQGMFAQLVAQNVLLIGGPLSWYSDPGLAGVSLTGGLSYKED
TKELVVAKAGVYYVFFQLELRRVVAGEGSGSVSLALHLQPLRSAAGAAA
LALTVDLPPASSEARNSAFGFQGRLLHLSAGQRLGVHLHTEARARHAWQ
LXQGATVLGLFRVTPEIPAGLPSPRSE.

where X is any amino acid other than Thr. In some cases, X is Ala;

(SEQ ID NO:177)
PAGILDLRQGMFAQLVAQNVLLIGGPLSWYSDPGLAGVSLTGGLSYKED
TKELVVAKAGVYYVFFQLELRRVVAGEGSGSVSLALHLQPLRSAAGAAA
LALTVDLPPASSEARNSAFGFQGRLLHLSAGQRLGVHLHTEARARHAWQ
LTXGATVLGLFRVTPEIPAGLPSPRSE.

where X is any amino acid other than Gln. In some cases, X is Ala;

(SEQ ID NO:178)
PAGLLDLRQGMFAQLVAQNVLLIGGPLSWYSDPGLAGVSLTGGLSYKED
TKELVVAKAGVYYVITQLELRRVVAGEGSGSVSLALHLQPLRSAAGAAA
LALTVDLPPASSEARNSAFGFQGRLLHLSAGQRLGVHLHTEARARHAWQ
LTQXATVLGLFRVTPEIPAGLPSPRSE.

where X is any amino acid other than Gly. In some cases, X is Ala;

(SEQ ID NO:179)
PAGLLDLRQGMFAQLVAQNVLLIGGPLSWYSDPGLAGVSLTGGLSYKED
TKELVVAKAGVYYVITQLELRRVVAGEGSGSVSLALHLQPLRSAAGAAA
LALTVDLPPASSEARNSAFGFQGRLLHLSAGQRLGVHLHTEARARHAWQ
LTQGAXVLGLFRVTPEIPAGLPSPRSE.

where X is any amino acid other than Thr. In some cases, X is Ala; and

(SEQ ID NO:180)
PAGLLDLRQGMFAQLVAQNVLLIGGPLSWYSDPGLAGVSLTGGLSYKED
TKELVVAKAGVYYVFFQLELRRVVAGEGSGSVSLALHLQPLRSAAGAAA
LALTVDLPPASSEARNSAFGFQGRLLHLSAGQRLGVHLHTEARARHAWQ
LTQGATXLGLFRVTPEIPAGLPSPRSE.

where X is any amino acid other than Val. In some cases, X is Ala.

### IL-2 Variants

[0284] In some cases, a variant immunomodulatory polypeptide present in a TMMP of the present disclosure is a variant IL-2 polypeptide. Wild-type IL-2 binds to IL-2 receptor (IL-2R), i.e., a heterotrimeric polypeptide comprising IL-2Rα, IL-2Rβ, and IL-2Rγ.

[0285] A wild-type IL-2 amino acid sequence can be as follows:

(SEQ ID NO:15)
[sequence omitted]

[0286] Wild-type IL2 binds to an IL2 receptor (IL2R) on the surface of a cell. An IL2 receptor is in some cases a heterotrimeric polypeptide comprising an alpha chain (IL-2Rα; also referred to as CD25), a beta chain also referred to as CD122: and a gamma chain (IL-2Rγ; also referred to as CD132). Amino acid sequences of human IL-2Rα, IL2Rβ, and IL-2Rγ can be as follows.

(SEQ ID NO:16)
Human IL-2Rα: ELCDDDPPEIPHATFKAMAYKEGTMLNCECKR
GFRRIKSGSLYMLCTGNSSHSSWDNQCQCTSSATRNTTKQVTPQPEEQK
ERKTTEMQSPMQPVDQASLPGHCREPPPWENEATERIYHFVVGQMVYYQ
CVQGYRALHRGPAESVCKMTHGKTRWTQPQLICTGEMETSQFPGEEKPQ
ASPEGRPESETSCLVTTTDFQIQTEMAATMETSIFTTEYQVAVAGCVFL
LISVLLLSGLTWQRRQRKSRRTI.
(SEQ ID NO:17)
Human IL-2Rβ: VNGTSQFTCFYNSRANISCVWSQDGALQDTSC
QVHAWPDRRRWNQTCELLPVSQASWACNLILGAPDSQKLTTVDIVTLRV
LCREGVRWRVMAIQDFKPFENLRLMAPISLQVVHVETHRCNISWEISQA
SHYFERHLEFEARTLSPGHTWEEAPLLTLKQKQEWICLETLTPDTQYEF
QVRVKPLQGEFTTWSPWSQPLAFRTKPAALGKDTIPWLGHLLVGLSGAF
GFIILVYLLINCRNTGPWLKKVLKCNTPDPSKFFSQLSSEHGGDVQKWL
SSPFPSSSFSPGGLAPEISPLEVLERDKVTQLLLQQDKVPEPASLSSNH
SLTSCFTNQGYFFFHLPDALEIEACQVYFTYDPYSEEDPDEGVAGAPTG
SSPQPLQPLSGEDDAYCTFPSRDDLLLFSPSLLGGPSPPSTAPGGSGAG
EERMPPSLQERVPRDWDPQPLGPPTPGVPDLVDFQPPPELVLREAGEEV
PDAGPREGVSFPWSRPPGQGEFRALNARLPLNTDAYLSLQELQGQDPTH
LV.
(SEQ ID NO:18)
Human IL-2Rγ: LNTTILTPNGNEDTTADFFLTTMPTDSLSVST
LPLPEVQCFVFNVEYMNCTWNSSSEPQPTNLTLHYWYKNSDNDKVQKCS
HYLFSEEITSGCQLQKKEIHLYQTFVVQLQDPREPRRQATQMLKLQNLV
IPWAPENLTLHKLSESQLELNWNNRFLNHCLEHLVQYRTDWDHSWTEQS
VDYRHKFSLPSVDGQKRYTFRVRSRFNPLCGSAQHWSEWSHPIHWGSNT
SKENPFLFALEAVVISVGSMGLIISLLCVYFWLERTMPRIPTLKNLEDL
VTEYHGNFSAWSGVSKGLAESLQPDYSERLCLVSEIPPKGGALGEGPGA
SPCNQHSPYWAPPCYTLKPET.

[0287] In some cases, where a TMMP of the present disclosure comprises a variant IL-2 polypeptide, a “cognate co-immunomodulatory polypeptide” is an IL-2R comprising polypeptides comprising the amino acid sequences of SEQ ID NO:16, 17, and 18.

[0288] In some cases, a variant IL-2 polypeptide exhibits reduced binding affinity to IL-2R, compared to the binding affinity of a IL-2 polypeptide comprising the amino acid sequence set forth in SEQ ID NO:15. For example, in some cases, a variant IL-2 polypeptide binds IL-2R with a binding affinity that is at least 10% less, at least 15% less, at least 20% less, at least 25%, at least 30% less, at least 35% less, at least 40% less, at least 45% less, at least 50% less, at least 55% less, at least 60% less, at least 65% less, at least 70% less, at least 75% less, at least 80% less, at least 85% less, at least 90% less, at least 95% less, or more than 95% less, than the binding affinity of an IL-2 polypeptide comprising the amino acid sequence set forth in SEQ ID NO:15 for an IL-2R (e.g., an IL-2R comprising polypeptides comprising the amino acid sequence set forth in SEQ ID NOs:16-18), when assayed under the same conditions.

[0289] In some cases, a variant IL-2 polypeptide has a binding affinity to IL-2R that is from 100 nM to 100 μM. As another example, in some cases, a variant IL-2 polypeptide has a binding affinity for IL-2R (e.g., an IL-2R comprising polypeptides comprising the amino acid sequence set forth in SEQ ID NOs:16-18) that is from about 100 nM to 150 nM, from about 150 nM to about 200 nM, from about 200 nM to about 250 nM, from about 250 nM to about 300 nM, from about 300 nM to about 350 nM, from about 350 nM to about 400 nM, from about 400 nM to about 500 nM, from about 500 nM to about 600 nM, from about 600 nM to about 700 nM, from about 700 nM to about 800 nM, from about 800 nM to about 900 nM, from about 900 nM to about 1 μM, to about 1 μM to about 5 μM, from about 5 μM to about 10 μM, from about 10 μM to about 15 μM, from about 15 μM to about 20 μM, from about 20 μM to about 25 μM, from about 25 μM to about 50 μM, from about 50 μM to about 75 μM, or from about 75 μM to about 100 μM.

[0290] In some cases, a variant IL-2 polypeptide has a single amino acid substitution compared to the IL-2 amino acid sequence set forth in SEQ ID NO:15. In some cases, a variant IL-2 polypeptide has from 2 to 10 amino acid substitutions compared to the IL-2 amino acid sequence set forth in SEQ ID NO:15. In some cases, a variant IL-2 polypeptide has 2 amino acid substitutions compared to the IL-2 amino acid sequence set forth in SEQ ID NO:15. In some cases, a variant IL-2 polypeptide has 3 amino acid substitutions compared to the IL-2 amino acid sequence set forth in SEQ ID NO:15. In some cases, a variant IL-2 polypeptide has 4 amino acid substitutions compared to the IL-2 amino acid sequence set forth in SEQ ID NO:15. In some cases, a variant IL-2 polypeptide has 5 amino acid substitutions compared to the IL-2 amino acid sequence set forth in SEQ ID NO:15. In some cases, a variant IL-2 polypeptide has 6 amino acid substitutions compared to the IL-2 amino acid sequence set forth in SEQ ID NO:15. In some cases, a variant IL-2 polypeptide has 7 amino acid substitutions compared to the IL-2 amino acid sequence set forth in SEQ ID NO:15. In some cases, a variant IL-2 polypeptide has 8 amino acid substitutions compared to the IL-2 amino acid sequence set forth in SEQ ID NO:15. In some cases, a variant IL-2 polypeptide has 9 amino acid substitutions compared to the IL-2 amino acid sequence set forth in SEQ H) NO:15. In some cases, a variant IL-2 polypeptide has 10 amino acid substitutions compared to the IL-2 amino acid sequence set forth in SEQ ID NO:15.

[0291] Suitable IL-2 variants include a polypeptide that comprises an amino acid sequence having at least 90%, at least 95%, at least 98%, at least 99%, or 100%, amino acid sequence identity to any one of the following amino acid sequences:

(SEQ ID NO:181)
APTSSSTKKTQLQLEHLLLDLQMILNGINNYKNPKLTRMLTXKFYMPKK
ATELKHLQCLEEELKPLEEVLNLAQSKNFHLRPRDLISNINVIVLELKG
SETTFMCEYADETATIVEFLNRWITFCQSIISTLT,

where X is any amino acid other than Phe. In some cases, X is Ala. In some cases, X is Met. In some cases, X is Pro. In some cases, X is Ser. In some cases, X is Thr. In some cases, X is Trp. In some cases, X is Tyr. In some cases, X is Val. In some cases, X is His;

(SEQ ID NO:182)
APTSSSTKKTQLQLEHLLLXLQMILNGINNYKNPKLTRMLTFKFYMPKK
ATELKHQCLEEELKPLEEVLNLAQSKNFHLRPRDLISNINVIVLELKGS
ETTFMCEYADETATIVEFLNRWITFCQSIISTLT,

where X is any amino acid other than Asp. In some cases, X is Ala;

(SEQ ID NO:183)
APTSSSTKKTQLQLXHLLLDLQMILNGINNYKNPKLTRMLTFKFYMPKK
ATELKHLQCLEEELKPLEEVLNLAQSKNFHLRPRDLISNINVIVLELKG
SETTFMCEYADETATIVEFLNRWITFCQSIISTLT,

where X is any amino acid other than Glu. In some cases, X is Ala.

(SEQ ID NO: 184)
APTSSSTKKTQLQLEXLLLDLQMILNGINNYKNPKLTRMLTFKFYMPKK
ATELKHLQCLEEELKPLEEVLNLAQSKNFHLRPRDLISNINVIVLELKG
SETTFMCEYADETATIVEFLNRWITFCQSIISTLT,

where X is any amino acid other than His. In some cases, X is Ala. In some cases, X is Thr. In some cases, X is Asn. In some cases, X is Cys. In some cases, X is Gln. In some cases, X is Met. In some cases, X is Val. In some cases, X is Trp;

(SEQ ID NO:185)
APTSSSTKKTQLQLEXLLLDLQMILNGINNYKNPKLTRMLTFKFYMPKK
ATELKHLQCLEEELKPLEEVLNLAQSKNFHLRPRDLISNINVIVLELKG
SETTFMCEYADETATIVEFLNRWITFCQSIISTLT,

where X is any amino acid other than His. In some cases, X is Ala. In some cases, X is Arg. In some cases, X is Asn. In some cases, X is Asp. In some cases, X is Cys. In some cases, X is Gln. In some cases, X is Gln. In some cases, X is Gly. In some cases, X is Ile. In some cases, X is Lys. In some cases, X is Leu. In some cases, X is Met. In some cases, X is Phe. In some cases, X is Pro. In some cases, X is Ser. In some cases, X is Thr. In some cases, X is Tyr. In some cases, X is Trp. In some cases, X is Val;

(SEQ ID NO:186)
APTSSSTKKTQLQLEHLLLDLQMILNGINNYKNPKLTRMLTFKFXMPKK
ATELKHLQCLEEELKPLEEVLNLAQSKNFHLRPRDLISNINVIVLELKG
SETTFMCEYADETATIVEFLNRWITFCQSIISTLT,

where X is any amino acid other than Tyr. In some cases, X is Ala;

(SEQ ID NO:187)
APTSSSTKKTQLQLEHLLLDLQMILNGINNYKNPKLTRMLTFKFYMPKK
ATELKHLQCLEEELKPLEEVLNLAQSKNFHLRPRDLISNINVIVLELKG
SETTFMCEYADETATIVEFLNRWITFCXSIISTLT,

where X is any amino acid other than Gln. In some cases, X is Ala;

(SEQ ID NO:188)
APTSSSTKKTQLQLEX₁LLLDLQMILNGINNYKNPKLTRMLT
X₂FYMPKKATELKHLQCLEEELKPLEEVLNLAQSKNFHLRPR
DLISNINVIVLELKGSETTFMCEYADETATIVEFLNRWITFCQSIISTL
T,

where X₁ is any amino acid other than His, and where X₂ is any amino acid other than Phe. In some cases, X₁ is Ala. In some cases, X₂ is Ala. In some cases, X₁ is Ala; and X₂ is Ala. In some cases, X₁ is Thr; and X₂ is Ala;

(SEQ ID NO:189)
APTSSSTKKTQLQLEHLLLX1LQMILNGINNYKNPKLTRMLTX2KFYMPK
KATELKHLQCLEEELKPLEEVLNLAQSKNFHLRPRDLISNINVIVLELK
GSETTFMCEYADETATIVEFLNRWITFCQSIISTLT,

where X₁ is any amino acid other than Asp; and where X₂ is any amino acid other than Phe. In some cases, X₁ is Ala. In some cases, X₂ is Ala. In some cases, X₁ is Ala; and X₂ is Ala;

(SEQ ID NO: 190)
APTSSSTKKTQLQLX1HLLLX2LQMILNGINNYKNPKLTRMLTX3KFYM
PKKATELKHLQCLEEELKPLEEVLNLAQSKNFHLRPRDLISNINVIVLE
LKGSETTFMCEYADETATIVEFLNRWITFCQSIISTLT,

where X₁ is any amino acid other than Glu; where X₂ is any amino acid other than Asp; and where X₃ is any amino acid other than Phe. In some cases, X₁ is Ala. In some cases, X₂ is Ala. In some cases, X₃ is Ala. In some cases, X₁ is Ala; X₂ is Ala; and X₃ is Ala;

(SEQ ID NO:191)
APTSSSTKKTQLQLEX1LLLX2LQMILNGINNYKNPKLTRMLTX3KFYM
PKKATELKHLQCLEEELKPLEEVLNLAQSKNFHLRPRDLISNINVIVLE
LKGSETTFMCEYADETATIVEFLNRWITFCQSIISTLT,

where X₁ is any amino acid other than His; where X₂ is any amino acid other than Asp; and where X₃ is any amino acid other than Phe. In some cases, X₁ is Ala. In some cases, X₂ is Ala. In some cases, X₃ is Ala. In some cases, X₁ is Ala; X₂ is Ala; and X₃ is Ala;

(SEQ ID NO:192)
APTSSSTKKTQLQLEHLLLXX1LQMILNGINNYKNPKLTRMLTX2KFYM
PKKATELKHLQCLEEELKPLEEVLNLAQSKNFHLRPHDLISNINVIVLE
LKGSETTFMCEYADETATIVEFLNRWITFCX₃SIISTLT,

where X₁ is any amino acid other than Asp; where X₂ is any amino acid other than Phe; and where X₃ is any amino acid other than Gln. In some cases, X₁ is Ala. In some cases, X₂ is Ala. In some cases, X₃ is Ala. In some cases, X₁ is Ala; X₂ is Ala; and X₃ is Ala;

(SEQ ID NO:193)
APTSSSTKKTQLQLEHLLLX1LQMILNGINNYKNPKLTRMLTX2KFX₃M
PKKATELKHLQCLEEELKPLEEVLNLAQSKNFHLRPRDLISNINVIVLE
LKGSETTFMCEYADETATIVEFLNRWITFCX3SIISTLT,

where X₁ is any amino acid other than Asp; where X₂ is any amino acid other than Phe; and where X₃ is any amino acid other than Tyr. In some cases, X₁ is Ala. In some cases, X₂ is Ala. In some cases, X₃ is Ala. In some cases, X₁ is Ala; X₂ is Ala; and X₃ is Ala;

(SEQ ID NO:194)
APTSSSTKKTQLQLEX1LLLX2LQMILNGINNYKNPKLTRMLTX3KFX4
MPKKATELKHLQCLEEELKPLEEVLNLAQSKNFHLRPRDLISNINVIVL
ELKGSETTFMCEYADETATIVEFLNRWITFCQSIISTLT,

where X₁ is any amino acid other than His; where X₂ is any amino acid other than Asp; where X₃ is any amino acid other than Phe; and where X₄ is any amino acid other than Tyr. In some cases, X₁ is Ala. In some cases, X₂ is Ala. In some cases, X₃ is Ala. In some cases, X₄ is Ala. In some cases, X₁ is Ala; X₂ is Ala; X₃ is Ala; and X₄ is Ala;

(SEQ ID NO:195)
APTSSSTKKTQLQLEHLLLX1LQMILNGINNYKNPKLTRMLTX2KFX3M
PKKATELKHLQCLEEELKPLEEVLNLAQSKNFHLRPRDLISNINVIVLE
LKGSETTFMCEYADETATIVEFLNRWITFCX4SIISTLT,

where X₁ is any amino acid other than Asp; where X₂ is any amino acid other than Phe; where X₃ is any amino acid other than Tyr; and where X₄ is any amino acid other than Gln. In some cases, X₁ is Ala. In some cases, X₂ is Ala. In some cases, X₃ is Ala. In some cases, X₄ is Ala. In some cases, X₁ is Ala; X₂ is Ala; X₃ is Ala; and X₄ is Ala;

(SEQ ID NO:196)
APTSSSTKKTQLQLEX1LLLX2LQMILNGINNYKNPKLTRMLTX3KFX4
MPKKATELKHLQCLEEELKPLEEVLNLAQSKNFHLRPRDLISNINVIVL
ELKGSETTFMCEYADETATIVEFLNRWITFCX5SIISTLT,

where X₁ is any amino acid other than His; where X₂ is any amino acid other than Asp; where X₃ is any amino acid other than Phe; where X₄ is any amino acid other than Tyr; and where X₅ is any amino acid other than Gln. In some cases, X₁ is Ala. In some cases, X₂ is Ala. In some cases, X₃ is Ala. In some cases, X₄ is Ala. In some cases, X₅ is Ala. In some cases, X₁ is Ala; X₂ is Ala; X₃ is Ala; X₄ is Ala; X₅ is Ala; and

(SEQ ID NO:197)
APTSSSTKKTQLQLEX1LLLDLQMILNGINNYKNPKLTRMLTX2KFYMP
KKATELKHLQCLEEELKPLEEVLNLAQSKNFHLRPRDLISNINVIVLEL
KGSETTFMCEYADETATIVEFLNRWITFCX3SIISTLT,

where X₁ is any amino acid other than His; where X₂ is any amino acid other than Phe; and where X₃ is any amino acid other than Gln. In some cases, X₁ is Ala. In some cases, X₂ is Ala. In some cases, X₃ is Ala. In some cases, X₁ is Ala; X₂ is Ala; and X₃ is Ala.

### Additional Polypeptides

[0292] A polypeptide chain of a TMMP of the present disclosure can include one or more polypeptides in addition to those described above. Suitable additional polypeptides include epitope tags and affinity domains. The one or more additional polypeptide can be included at the N-terminus of a polypeptide chain of a TMMP, at the C-terminus of a polypeptide chain of a TMMP, or internally within a polypeptide chain of a TMMP.

### Epitope Tag

[0293] Suitable epitope tags include, but are not limited to, hemagglutinin (HA; e.g., YPYDVPDYA (SEQ ID NO:271); FLAG (e.g., DYKDDDDK (SEQ ID NO:272); c-myc (e.g., EQKLISEEDL; SEQ ID NO:273), and the like.

### Affinity Domain

[0294] Affinity domains include peptide sequences that can interact with a binding partner, e.g., such as one immobilized on a solid support, useful for identification or purification. DNA sequences encoding multiple consecutive single amino acids, such as histidine, when fused to the expressed protein, may be used for one-step purification of the recombinant protein by high affinity binding to a resin column, such as nickel sepharose. Exemplary affinity domains include His5 (HHHHH) (SEQ ID NO:271), HisX6 (HHHHHH) (SEQ ID NO:275), C-myc (EQKLISEEDL) (SEQ ID NO:276), Flag (DYKDDDDK) (SEQ ID NO:277), StrepTag (WSHPQFEK) (SEQ ID NO:278), hemagglutinin, e.g., HA Tag (YPYDVPDYA) (SEQ ID NO:279), glutathione-S-transferase (GST), thioredoxin, cellulose binding domain, RYIRS (SEQ ID NO:280), Phe-His-His-Thr (SEQ NO:281), chitin binding domain, S-peptide, T7 peptide, SH2 domain, C-end RNA tag, WEAAAREACCRECCARA (SEQ ID NO:282), metal binding domains, e.g., zinc binding domains or calcium binding domains such as those from calcium-binding proteins, e.g., calmodulin, troponin C, calcineurin B, myosin light chain, recoverin, S-modulin, visinin, VILIP, neurocalcin, hippocalcin, frequenin, caltractin, calpain large-subunit, S100 proteins, parvalbumin, calbindin D9K, calbindin D28K, and calretinin, inteins, biotin, streptavidin, MyoD, Id, leucine zipper sequences, and maltose binding protein.

### Drug Conjugates

[0295] A polypeptide chain of a TMMP of the present disclosure can comprise a small molecule drug linked (e.g., covalently attached) to the polypeptide chain. For example, where a TMMP of the present disclosure comprises an Fc polypeptide, the Fc polypeptide can comprise a covalently linked small molecule drug. In some cases, the small molecule drug is a cancer chemotherapeutic agent, e.g., a cytotoxic agent. A polypeptide chain of a TMMP of the present disclosure can comprise a cytotoxic agent linked (e.g., covalently attached) to the polypeptide chain. For example, where a TMMP of the present disclosure comprises an Fc polypeptide, the Fc polypeptide can comprise a covalently linked cytotoxic agent. Cytotoxic agents include prodrugs.

[0296] A drug (e.g., a cancer chemotherapeutic agent) can be linked directly or indirectly to a polypeptide chain of a TMMP of the present disclosure. For example, where a TMMP of the present disclosure comprises an Fc polypeptide, a drug (e.g., a cancer chemotherapeutic agent) can be linked directly or indirectly to the Fc polypeptide. Direct linkage can involve linkage directly to an amino acid side chain. Indirect linkage can be linkage via a linker. A drug (e.g., a cancer chemotherapeutic agent) can be linked to a polypeptide chain (e.g., an Fc polypeptide) of a TMMP of the present disclosure via a thioether bond, an amide bond, a carbamate bond, a disulfide bond, or an ether bond.

[0297] Linkers include cleavable linkers and non-cleavable linkers. In some cases, the linker is a protease-cleavable linker. Suitable linkers include, e.g., peptides (e.g., from 2 to 10 amino acids in length; e.g., 2, 3, 4, 5, 6, 7, 8, 9, or 10 amino acids in length), alkyl chains, poly(ethylene glycol), disulfide groups, thioether groups, acid labile groups, photolabile groups, peptidase labile groups, and esterase labile groups. Non-limiting example of suitable linkers are: i) N-succinimidyl-[(N-maleimidopropionamido)-tetraethyleneglycol]ester (NHS-PEG4-maleimide); ii) N-succinimidyl 4-(2-pyridyldithio)butanoate (SPDB); N-succinimidyl 4-(2-pyridyldithio)2-sulfobutanoate (sulfo-SPDB); N-succinimidyl 4-(2-pyridyldithio) pentanoate (SPP); N-succinimidyl-4-(N-maleimidomethyl)-cyclohexane-1-carboxy-(6-amidocaproate) (LC-SMCC); κ-maleimidoundecanoic acid N-succinimidyl ester (KMUA); γ-maleimide butyric acid N-succinimidyl ester (GMBS); ε-maleimidocaproic acid N-hydroxysuccinimide ester (EMCS); m-maleimide benzoyl-N-hydroxysuccinimide ester (MBS); N-(α-maleimidoacetoxy)-succinimide ester (AMAS); succinimidyl-6-(β-maleimidopropionamide)hexanoate (SMPH); N-succinimidyl 4-(p-maleimidophenyl)butyrate (SMPB); N-(p-maleimidophenyl)isocyanate (PMPI); N-succinimidyl 4(2-pyridylthio)pentanoate (SPP); N-succinimidyl(4-iodo-acetyl)aminobenzoate (SIAB); 6-maleimidocaproyl (MC); maleimidopropanoyl (MP); p-aminobenzyloxycarbonyl (PAB); N-succinimidyl 4-(maleimidomethyl)cyclohexanecarboxylate (SMCC); N-succinimidyl-4-(N-maleimidomethyl)-cyclohexane-1-carboxy-(6-amidocaproate), a “long chain” analog of SMCC (LC-SMCC); 3-maleimidopropanoic acid N-succinimidyl ester (BMPS); N-succinimidyl iodoacetate (SIA); N-succinimidyl bromoacetate (SBA); and N-succinimidyl 3-(bromoacetamido)propionate (SBAP).

[0298] A polypeptide (e.g., an Fc polypeptide) can be modified with crosslinking reagents such as succinimidyl 4-(N-maleimidomethyl)-cyclohexane-1-carboxylate (SMCC), sulfo-SMCC, maleimidobenzoyl-N-hydroxysuccinimide ester (MBS), sulfo-MBS or succinimidyl-iodoacetate, as described in the literature, to introduce 1-10 reactive groups. The modified Fc polypeptide is then reacted with a thiol-containing cytotoxic agent to produce a conjugate.

[0299] For example, where a TMMP of the present disclosure comprises an Fc polypeptide, the polypeptide chain comprising the Fc polypeptide can be of the formula (A)-(L)-(C), where (A) is the polypeptide chain comprising the Fc polypeptide; where (L), if present, is a linker; and where (C) is a cytotoxic agent. (L), if present, links (A) to (C). In some cases, the polypeptide chain comprising the Fc polypeptide can comprise more than one cytotoxic agent (e.g., 2, 3, 4, or 5, or more than 5, cytotoxic agents).

[0300] Suitable drugs include, e.g., rapamycin. Suitable drugs include, e.g., retinoids, such as all-trans retinoic acid (ATRA); vitamin D3; a vitamin D3 analog; and the like. As noted above, in some cases, a drug is a cytotoxic agent. Cytotoxic agents are known in the art. A suitable cytotoxic agent can be any compound that results in the death of a cell, or induces cell death, or in some manner decreases cell viability, and includes, for example, maytansinoids and maytansinoid analogs, benzodiazepines, taxoids, CC-1065 and CC-1065 analogs, duocarmycins and duocarmycin analogs, enediynes, such as calicheamicins, dolastatin and dolastatin analogs including auristatins, tomaymycin derivatives, leptomycin derivatives, methotrexate, cisplatin, carboplatin, daunorubicin, doxorubicin, vincristine, vinblastine, melphalan, mitomycin C, chlorambucil and morpholino doxorubicin.

[0301] For example, in some cases, the cytotoxic agent is a compound that inhibits microtubule formation in eukaryotic cells. Such agents include, e.g., maytansinoid, benzodiazepine, taxoid, CC-1065, duocarmycin, a duocarmycin analog, calichcamicin, dolastatin, a dolastatin analog, auristatin, tomaymycin, and leptomycin, or a pro-drug of any one of the foregoing. Maytansinoid compounds include, e.g., N(2′)-deacetyl-N(2′)-(3-mercapto-1-oxopropyl)-maytansine (DM1); N(2′)-deacetyl-N(2′)-(4-mercapto-1-oxopentyl)-maytansine (DM3); and N(2′)-deacetyl-N2-(4-mercapto-4-methyl-1-oxopentyl)-maytansine (DM4). Benzodiazepines include, e.g., indolinobenzodiazepines and oxazolidinobenzodiazepines.

[0302] Cytotoxic agents include taxol; cytochalasin B; gramicidin D; ethidium bromide; emetine; mitomycin; etoposide; tenoposide; vincristine; vinblastine; colchicin; doxorubicin; daunorubicin; dihydroxy anthracin dime; maytansine or an analog or derivative thereof; an auristatin or a functional peptide analog or derivative thereof; dolastatin 10 or 15 or an analogue thereof; irinotecan or an analogue thereof; mitoxantrone; mithramycin; actinomycin D; 1-dehydrotestosterone; a glucocorticoid; procaine; tetracaine; lidocaine; propranolol; puromycin; calicheamicin or an analog or derivative thereof; an antimetabolite; 6 mercaptopurine; 6 thioguanine; cytarabine; fludarabin; 5 fluorouracil; decarbazine; hydroxyurea; asparaginase; gemcitabine; cladribine; an alkylating agent; a platinum derivative; duocarmycin A; duocarmycin SA; rachelmycin (CC-1065) or an analog or derivative thereof; an antibiotic; pyrrolo[2,1-c][1,4]-benzodiazepines (PDB); diphtheria toxin; ricin toxin; cholera toxin; a Shiga-like toxin; LT toxin; C3 toxin; Shiga toxin; pertussis toxin; tetanus toxin; soybean Bowman-Birk protease inhibitor; Pseudomonas exotoxin; alorin; saporin; modeccin; gelanin; abrin A chain; modeccin A chain; alpha-sarcin; Aleurites fordii proteins; dianthin proteins; Phytolacca americana proteins; Momordica charantia inhibitor; curcin; crotin; Sapaonaria officinalis inhibitor; gelonin; mitogellin; restrictocin; phenomycin; enomycin toxins; ribonuclease (RNase); DNase I; Staphylococcal enterotoxin A; pokeweed antiviral protein; diphtherin toxin; and Pseudomonas endotoxin.

### Exemplary TMMPs

[0303] A TMMP of the present disclosure comprises at least one heterodimer comprising: a) a first polypeptide comprising: i) an AFP peptide epitope; and ii) first MHC polypeptide; b) a second polypeptide comprising a second MHC polypeptide, and c) at least one immunomodulatory polypeptide, where the first and/or the second polypeptide comprises the immunomodulatory polypeptide. Thus, in some cases, a TMMP of the present disclosure comprises at least one heterodimer comprising: a) a first polypeptide comprising: i) an AFP peptide epitope; ii) first MHC polypeptide; and iii) at least one immunomodulatory polypeptide; and b) a second polypeptide comprising a second MHC polypeptide. In other instances, a TMMP of the present disclosure comprises at least one heterodimer comprising: a) a first polypeptide comprising: i) an AFP peptide epitope; and ii) first MHC polypeptide; and b) a second polypeptide comprising: i) a second MHC polypeptide; and ii) at least one immunomodulatory polypeptide. In some cases, a TMMP of the present disclosure comprises at least one heterodimer comprising: a) a first polypeptide comprising: i) an AFP peptide epitope; ii) first MHC polypeptide; and iii) at least one immunomodulatory polypeptide; and b) a second polypeptide comprising: i) a second MHC polypeptide; and ii) at least one immunomodulatory polypeptide. In some cases, the at least one immunomodulatory polypeptide is a wild-type immunomodulatory polypeptide. In other cases, the at least one immunomodulatory polypeptide is a variant immunomodulatory polypeptide that exhibits reduced affinity for a co-immunomodulatory polypeptide, compared to the affinity of a corresponding wild-type immunomodulatory polypeptide for the co-immunomodulatory polypeptide. In some cases, a TMMP of the present disclosure comprises two immunomodulatory polypeptides, where the two immunomodulatory polypeptides have the same amino acid sequence.

[0304] In some cases, a TMMP of the present disclosure comprises: a) a first polypeptide comprising, in order from N-terminus to C-terminus: i) an AFP peptide epitope; ii) a first MHC polypeptide; and iii) at least one immunomodulatory polypeptide; and b) a second polypeptide comprising, in order from N-terminus to C-terminus: a second MHC polypeptide; and ii) an Ig Fc polypeptide. In some cases, the first MHC polypeptide is a β2M polypeptide; and the second MHC polypeptide is an HLA heavy chain polypeptide. In some cases, the HLA heavy chain polypeptide is an HLA-A24 polypeptide. In some cases, the HLA heavy chain polypeptide is an HLA-A24 polypeptide with an A236C substitution. In some cases, the first polypeptide comprises, in order from N-terminus to C-terminus: i) an AFP peptide epitope; ii) a first MHC polypeptide; and iii) two immunomodulatory polypeptides, where the two immunomodulatory polypeptides have the same amino acid sequence. In some cases, the Ig Fc polypeptide is a human IgG1 Fc polypeptide. In some cases, the Ig Fc polypeptide is an IgG1 Fc polypeptide comprising L234A and L235A substitutions. In some cases, the first and the second polypeptides are disulfide linked to one another. In some cases, the immunomodulatory polypeptide is a variant IL-2 polypeptide comprising H16A and F42A substitutions. In some cases, the immunomodulatory polypeptide is a variant IL-2 polypeptide comprising H16T and F42A substitutions. In some cases, a peptide linker is between one or more of: i) the second MHC polypeptide and the Ig Fc polypeptide; ii) the epitope and the first MHC polypeptide; iii) the first MHC polypeptide and the immunomodulatory polypeptide; and (where the TMMP comprises two immunomodulatory polypeptides on the first polypeptide chain) iv) between the two immunomodulatory polypeptides. In some cases, the peptide linker comprises the amino acid sequence AAAGG. In some cases, the peptide linker comprises the amino acid sequence (GGGGS)n (SEQ ID NO:284), where n is an integer from 1 to 10 (e.g., where n is 2, 3, or 4).

[0305] In some cases, a TMMP of the present disclosure comprises: a) a first polypeptide comprising, in order from N-terminus to C-terminus: i) an AFP peptide epitope; and ii) a first MHC polypeptide; and b) a second polypeptide comprising, in order from N-terminus to C-terminus: i) at least one immunomodulatory polypeptide; ii) a second MHC polypeptide; and iii) an Ig Fc polypeptide. In some cases, the first MHC polypeptide is a β2M polypeptide; and the second MHC polypeptide is an HLA heavy chain polypeptide. In some cases, the HLA heavy chain polypeptide is an HLA-A24 polypeptide. In some cases, the HLA heavy chain polypeptide is an HLA-A24 polypeptide with an A236C substitution. In some cases, the second polypeptide comprises, in order from N-terminus to C-terminus: i) two immunomodulatory polypeptides, where the two immunomodulatory polypeptides have the same amino acid sequence; ii) a second MHC polypeptide; and iii) an Ig Fc polypeptide. In some cases, the Ig Fc polypeptide is a human IgG1 Fc polypeptide. In some cases, the Ig Fc polypeptide is an IgG1 Fc polypeptide comprising L234A and L235A substitutions. In some cases, the first and the second polypeptides are disulfide linked to one another. In some cases, the immunomodulatory polypeptide is a variant IL-2 polypeptide comprising H16A and F42A substitutions. In some cases, the immunomodulatory polypeptide is a variant IL-2 polypeptide comprising H16T and F42A substitutions. In some cases, a peptide linker is between one or more of: i) the second MHC polypeptide and the Ig Fc polypeptide; ii) the epitope and the first MHC polypeptide; iii) the first MHC polypeptide and the immunomodulatory polypeptide; and (where the TMMP comprises two immunomodulatory polypeptides on the second polypeptide chain) iv) between the two immunomodulatory polypeptides. In some cases, the peptide linker comprises the amino acid sequence AAAGG (SEQ ID NO: 387). In some cases, the peptide linker comprises the amino acid sequence (GGGGS)n (SEQ ID NO: 284), where n is an integer from 1 to 10 (e.g., where n is 2, 3, or 4).

[0306] In some cases, a TMMP of the present disclosure comprises: a) a first polypeptide comprising, in order from N-terminus to C-terminus: i) an AFP peptide epitope; and ii) a first MHC polypeptide; and b) a second polypeptide comprising, in order from N-terminus to C-terminus: i) a second MHC polypeptide; ii) an Ig Fc polypeptide; and iii) at least one immunomodulatory polypeptide. In some cases, the first MHC polypeptide is a β2M polypeptide; and the second MHC polypeptide is an HLA heavy chain polypeptide. In some cases, the HLA heavy chain polypeptide is an HLA-A24 polypeptide. In some cases, the HLA heavy chain polypeptide is an HLA-A24 polypeptide with an A236C substitution. In some cases, the second polypeptide comprises, in order from N-terminus to C-terminus: i) a second MHC polypeptide; ii) an Ig Fc polypeptide; and iii) two immunomodulatory polypeptides, where the two immunomodulatory polypeptides have the same amino acid sequence. In some cases, the Ig Fc polypeptide is a human IgG1 Fc polypeptide. In some cases, the Ig Fc polypeptide is an IgG1 Fc polypeptide comprising L234A and L235A substitutions. In some cases, the first and the second polypeptides are disulfide linked to one another. In some cases, the immunomodulatory polypeptide is a variant IL-2 polypeptide comprising H16A and F42A substitutions. In some cases, the immunomodulatory polypeptide is a variant IL-2 polypeptide comprising H16T and F42A substitutions. In some cases, a peptide linker is between one or more of: i) the second MHC polypeptide and the Ig Fc polypeptide; ii) the epitope and the first MHC polypeptide; iii) the Ig Fc polypeptide and the immunomodulatory polypeptide; and (where the TMMP comprises two immunomodulatory polypeptides on the second polypeptide chain) iv) between the two immunomodulatory polypeptides. In some cases, the peptide linker comprises the amino acid sequence AAAGG (SEQ ID NO:387). In some cases, the peptide tinker comprises the amino acid sequence (GGGGS)n (SEQ ID NO: 284), where n is an integer from 1 to 10 (e.g., where n is 2, 3, or 4).

[0307] In some cases, a TMMP of the present disclosure comprises: a) a first polypeptide comprising, in order from N-terminus to C-terminus: i) an AFP peptide epitope; and ii) a first MHC polypeptide; and b) a second polypeptide comprising, in order from N-terminus to C-terminus: i) at least one immunomodulatory polypeptide; ii) a second MHC polypeptide; and iii) an Ig Fc polypeptide. In some cases, the first MHC polypeptide is a β2M polypeptide; and the second MHC polypeptide is an HLA heavy chain polypeptide. In some cases, the HLA heavy chain polypeptide is an HLA-A24 polypeptide. In some cases, the HLA heavy chain polypeptide is an HLA-A24 polypeptide with an A236C substitution. In some cases, the Ig Fc polypeptide is a human IgG1 Fc polypeptide. In some cases, the Ig Fc polypeptide is an IgG1 Fc polypeptide comprising L234A and L235A substitutions. In some cases, the first and the second polypeptides are disulfide linked to one another. In some cases, the immunomodulatory polypeptide is a variant IL-2 polypeptide comprising H16A and F42A substitutions. In some cases, the immunomodulatory polypeptide is a variant IL-2 polypeptide comprising H16T and F42A substitutions.

[0308] In some cases, a TMMP of the present disclosure comprises: a) a first polypeptide comprising, in order from N-terminus to C-terminus: i) at least one immunomodulatory polypeptide; ii) an AFP peptide epitope; and iii) a first MHC polypeptide; and b) a second polypeptide comprising, in order from N-terminus to C-terminus: i) a second MHC polypeptide; and ii) an Ig Fc polypeptide. In some cases, the first MHC polypeptide is a β2M polypeptide; and the second MHC polypeptide is an HLA heavy chain polypeptide. In some cases, the HLA heavy chain polypeptide is an HLA-A24 polypeptide. In some cases, the HLA heavy chain polypeptide is an HLA-A24 polypeptide with an A236C substitution. In some cases, the first polypeptide comprises, in order from N-terminus to C-terminus: i) two immunomodulatory polypeptides, where the two immunomodulatory polypeptides have the same amino acid sequence; ii) an AFP peptide epitope; and iii) a first MHC polypeptide. In some cases, the Ig Fc polypeptide is a human IgG1 Fc polypeptide. In some cases, the Ig Fc polypeptide is an IgG1 Fc polypeptide comprising L234A and L235A substitutions. In some cases, the first and the second polypeptides are disulfide linked to one another. In some cases, the immunomodulatory polypeptide is a variant IL-2 polypeptide comprising H16A and F42A substitutions. In some cases, the immunomodulatory polypeptide is a variant IL-2 polypeptide comprising H16T and F42A substitutions. In some cases, a peptide linker is between one or more of: i) the second MHC polypeptide and the Ig Fc polypeptide; ii) the epitope and the first MHC polypeptide; iii) the immunomodulatory polypeptide and the epitope; and (where the TMMP comprises two immunomodulatory polypeptides on the first polypeptide chain) iv) between the two immunomodulatory polypeptides. In some cases, the peptide linker comprises the amino acid sequence AAAGG (SEQ ID NO: 387). In some cases, the peptide linker comprises the amino acid sequence (GGGGS)n (SEQ ID NO: 284), where n is an integer from 1 to 10 (e.g., where n is 2, 3, or 4).

[0309] In some cases, a TMMP of the present disclosure comprises: a) a first polypeptide comprising, in order from N-terminus to C-terminus: i) an AFP peptide epitope; and ii) a first MHC polypeptide; and b) a second polypeptide comprising, in order from N-terminus to C-terminus: i) a second MHC polypeptide; ii) at least one immunomodulatory polypeptide; and iii) an Ig Fc polypeptide. In some cases, the first MHC polypeptide is a β2M polypeptide; and the second MHC polypeptide is an HLA heavy chain polypeptide. In some cases, the HLA heavy chain polypeptide is an HLA-A24 polypeptide. In some cases, the HLA heavy chain polypeptide is an HLA-A24 polypeptide with an A236C substitution. In some cases, the second polypeptide comprises, in order from N-terminus to C-terminus: i) a second MHC polypeptide; ii) two immunomodulatory polypeptides, where the two immunomodulatory polypeptides have the same amino acid sequence; and iii) an Ig Fc polypeptide. In some cases, the Ig Fc polypeptide is a human IgG1 Fc polypeptide. In some cases, the Ig Fc polypeptide is an IgG1 Fc polypeptide comprising L234A and L235A substitutions. In some cases, the first and the second polypeptides are disulfide linked to one another. In some cases, the immunomodulatory polypeptide is a variant IL-2 polypeptide comprising H16A and F42A substitutions. In some cases, the immunomodulatory polypeptide is a variant IL-2 polypeptide comprising H16T and F42A substitutions. In some cases, a peptide linker is between one or more of: i) the second MHC polypeptide and the immunomodulatory polypeptide; ii) the immunomodulatory polypeptide and the Ig Fc polypeptide; iii) the epitope and the first MHC polypeptide; iii) the first MHC polypeptide and the immunomodulatory polypeptide; and (where the TMMP comprises two immunomodulatory polypeptides on the second polypeptide chain) iv) between the two immunomodulatory polypeptides. In some cases, the peptide linker comprises the amino acid sequence AAAGG (SEQ ID NO: 387). In some cases, the peptide linker comprises the amino acid sequence (GGGGS)n (SEQ ID NO: 284), where n is an integer from 1 to 10 (e.g., where n is 2, 3, or 4).

[0310] As noted above, and as depicted schematically in FIG. 21, an immunomodulatory polypeptide (i.e., one or more immunomodulatory polypeptides) can be present in a TMMP of the present disclosure at any of a variety of positions. FIG. 21 depicts the position of two copies of a variant IL-2 polypeptide; however, the immunomodulatory polypeptide can be any of a variety of immunomodulatory polypeptide, as described herein. As depicted in FIG. 21, an immunomodulatory polypeptide can be: 1) N-terminal to the MHC class I heavy chain (position 1); 2) C-terminal to the MHC class I heavy chain and N-terminal to the Ig Fc polypeptide; in other words, between the MHC class I heavy chain and the Ig Fc polypeptide (position 2); 3) C-terminal to the Ig Fc polypeptide (position 3); 4) N-terminal to the peptide epitope (position 4); or 5) C-terminal to the β2M polypeptide (position 5). “Position 1” refers to a position of the immunomodulatory polypeptide on the same polypeptide chain as the class I MHC heavy chain and N-terminal to the class I MHC heavy chain; e.g., where the TMMP comprises: a) a first polypeptide comprising, in order from N-terminus to C-terminus: i) a peptide epitope (e.g., an AFP peptide); and ii) polypeptide; and b) a second polypeptide comprising, in order from N-terminus to C-terminus: i) one or more immunomodulatory polypeptides; and ii) a class I MHC heavy chain polypeptide. “Position 2” refers to a position of the immunomodulatory polypeptide on the same polypeptide chain as the class I MHC heavy chain and C-terminal to the class I MHC heavy chain, but not at the C-terminus of the polypeptide chain; e.g., where the TMMP comprises: a) a first polypeptide comprising, in order from N-terminus to C-terminus: i) a peptide epitope (e.g., an AFP peptide); and ii) a β2M polypeptide; and b) a second polypeptide comprising, in order from N-terminus to C-terminus: i) a class I MHC heavy chain polypeptide; ii) one or more immunomodulatory polypeptides; and iii) an Ig Fc polypeptide. “Position 3” refers to a position of the immunomodulatory polypeptide on the same polypeptide chain as the class I MHC heavy chain and at the C-terminus of the polypeptide chain; e.g., where the TMMP comprises: a) a first polypeptide comprising, in order from N-terminus to C-terminus: i) a peptide epitope (e.g., an AFP peptide); and ii) a β2M polypeptide; and b) a second polypeptide comprising, in order from N-terminus to C-terminus: i) a class I MHC heavy chain polypeptide; an Ig Fc polypeptide; and iii) one or more immunomodulatory polypeptides. “Position 4” refers to a position of the immunomodulatory polypeptide on the same polypeptide chain as the β2M polypeptide and N-terminal to the peptide epitope and the β2M polypeptide; e.g., where the TMMP comprises: a) a first polypeptide comprising, in order from N-terminus to C-terminus: i) one or more immunomodulatory polypeptides; ii) a peptide epitope (e.g., an AFP peptide); and iii) a β2M polypeptide; and b) a second polypeptide comprising a class I MHC heavy chain polypeptide (e.g., a second polypeptide comprising, in order from N-terminus to C-terminus: i) a class I MHC heavy chain polypeptide; and ii) an Ig Fc polypeptide. “Position 5” refers to a position of the immunomodulatory polypeptide on the same polypeptide chain as the β2M polypeptide and C-terminal to the β2M polypeptide (e.g., at the C-terminus of the polypeptide chain); e.g., where the TMMP comprises: a) a first polypeptide comprising, in order from N-terminus to C-terminus: i) a peptide epitope (e.g., an AFP peptide); ii) a β2M polypeptide; and iii) one or more immunomodulatory polypeptides; and b) a second polypeptide comprising a class I MHC heavy chain polypeptide (e.g., a second polypeptide comprising, in order from N-terminus to C-terminus: i) a class I MHC heavy chain polypeptide; and ii) an Ig Fc polypeptide.

[0311] Furthermore, as discussed above and as depicted schematically in FIG. 20A-20C, the first polypeptide chain and the second polypeptide chain of a TMMP of the present disclosure can be linked by one or more disulfide bonds. For example, a TMMMP of the present disclosure can comprise: a) a first polypeptide chain comprising an β2M polypeptide having an R12C substitution; and b) a second polypeptide chain comprising a class I MHC heavy chain polypeptide having an A236C substitution; such that a disulfide bond forms between the Cys at position 12 of the β2M polypeptide in the first polypeptide chain and the Cys at position 236 of the class I MHC heavy chain polypeptide in the second polypeptide chain. As another example, a TMMMP of the present disclosure can comprise: a) a first polypeptide comprising, in order from N-terminus to C-terminus: i) a peptide epitope (e.g., an AFP peptide); ii) a peptide linker comprising a GCGG(G4S)ₙ sequence, where n is 1, 2, or 3; and iii) a β2M polypeptide; and b) a second polypeptide comprising a class I MHC heavy chain polypeptide having a Y84C substitution, such that a disulfide bond forms between the Cys in the peptide linker in the first polypeptide chain and the Cys at position 84 of the class I MHC heavy chain polypeptide in the second polypeptide chain. In other examples, a TMMP of the present disclosure can comprise; a) a first polypeptide comprising, in order from N-terminus to C-terminus: i) a peptide epitope (e.g., an AFP peptide); ii) a peptide linker comprising a GCGG(G4S)ₙ sequence, where n is 1, 2, or 3; and iii) a β2M polypeptide having an R12C substitution; and b) a second polypeptide comprising a class I MHC heavy chain polypeptide having a Y84C substitution and an A236C substitution; such that: i) a first disulfide bond forms between the Cys in the peptide linker in the first polypeptide chain and the Cys at position 84 of the class I MHC heavy chain polypeptide in the second polypeptide chain; and ii) a second disulfide bond forms between the Cys at position 12 of the β2M polypeptide in the first polypeptide chain and the Cys at position 236 of the class I MHC heavy chain polypeptide in the second polypeptide chain. For simplicity, the first disulfide bond is referred to as “G2C/Y84C”; and the second disulfide bond is referred to as “R12C/A236C.” A TMMP of the present disclosure can include: a) a G2C/Y84C disulfide bond and not an R12C/A236C disulfide bond; b) an R12C/A236C disulfide bond and not a G2C/Y84C disulfide bond; or c) a G2C/Y84C disulfide bond and an R12C/A236C disulfide bond.

[0312] A TMMP of the present disclosure can include: a) a G2C/Y84C disulfide bond and not an R12C/A236C disulfide bond; and b) at least one immunomodulatory polypeptide at position 1. A TMMP of the present disclosure can include: a) a G2C/Y84C disulfide bond and not an R12C/A236C disulfide bond; and b) at least one immunomodulatory polypeptide at position 2. A TMMP of the present disclosure can include: a) a G2C/Y84C disulfide bond and not an R12C/A236C disulfide bond; and b) at least one immunomodulatory polypeptide at position 3. A TMMP of the present disclosure can include: a) a G2C/Y84C disulfide bond and not an R12C/A236C disulfide bond; and b) at least one immunomodulatory polypeptide at position 4. A TMMP of the present disclosure can include: a) a G2C/Y84C disulfide bond and not an R12C/A236C disulfide bond; and b) at least one immunomodulatory polypeptide at position 5.

[0313] A TMMP of the present disclosure can include: a) an R12C/A236C disulfide bond and not a G2C/Y84C disulfide bond; and at least one immunomodulatory polypeptide at position 1. A TMMP of the present disclosure can include: a) an R12C/A236C disulfide bond and not a G2C/Y84C disulfide bond; and at least one immunomodulatory polypeptide at position 2. A TMMP of the present disclosure can include: a) an R12C/A236C disulfide bond and not a G2C/Y84C disulfide bond; and at least one immunomodulatory polypeptide at position 3. A TMMP of the present disclosure can include: a) an R12C/A236C disulfide bond and not a G2C/Y84C disulfide bond; and at least one immunomodulatory polypeptide at position 4. A TMMP of the present disclosure can include: a) an R12C/A236C disulfide bond and not a G2C/Y84C disulfide bond; and at least one immunomodulatory polypeptide at position 5.

[0314] A TMMP of the present disclosure can include: a) a G2C/Y84C disulfide bond and an R12C/A236C disulfide bond; and b) and at least one immunomodulatory polypeptide at position 1. A TMMP of the present disclosure can include: a) a G2C/Y84C disulfide bond and an R12C/A236C disulfide bond; and b) and at least one immunomodulatory polypeptide at position 2. A TMMP of the present disclosure can include: a) a G2C/Y84C disulfide bond and an R12C/A236C disulfide bond; and b) and at least one immunomodulatory polypeptide at position 3. A TMMP of the present disclosure can include: a) a G2C/Y84C disulfide bond and an R12C/A236C disulfide bond; and b) and at least one immunomodulatory polypeptide at position 4. A TMMP of the present disclosure can include: a) a G2C/Y84C disulfide bond and an R12C/A236C disulfide bond; and b) and at least one immunomodulatory polypeptide at position 5.

[0315] Non-limiting examples of amino acid sequences of first and second polypeptide chains of a TMMP of the present disclosure are provided in FIGS. 4A-4K and FIG. 17A-17C.

[0316] In some cases, a TMMP of the present disclosure comprises: a) a first polypeptide chain comprising the amino acid sequence designated “2754” as depicted in FIG. 4D; and b) a second polypeptide chain comprising the amino acid sequence designated “2750” as depicted in FIG. 4C.

[0317] In some cases, a TMMP of the present disclosure comprises: a) a first polypeptide chain comprising the amino acid sequence designated “2755” as depicted in FIG. 4E; and b) a second polypeptide chain comprising the amino acid sequence designated “2750” as depicted in FIG. 4C.

[0318] In some cases, a TMMP of the present disclosure comprises: a) a first polypeptide chain comprising the amino acid sequence designated “2756” as depicted in FIG. 4F; and b) a second polypeptide chain comprising the amino acid sequence designated “2750” as depicted in FIG. 4C.

[0319] In some cases, a TMMP of the present disclosure comprises: a) a first polypeptide chain comprising the amino acid sequence designated “2757” as depicted in FIG. 4G; and b) a second polypeptide chain comprising the amino acid sequence designated “2750” as depicted in FIG. 4C.

[0320] In some cases, a TMMP of the present disclosure comprises: a) a first polypeptide chain comprising the amino acid sequence designated “2758” as depicted in FIG. 4H; and b) a second polypeptide chain comprising the amino acid sequence designated “2750” as depicted in FIG. 4C.

[0321] In some cases, a TMMP of the present disclosure comprises: a) a first polypeptide chain comprising the amino acid sequence designated “2754” as depicted in FIG. 4D; and b) a second polypeptide chain comprising the amino acid sequence designated “3158” as depicted in FIG. 4B.

[0322] In some cases, a TMMP of the present disclosure comprises: a) a first polypeptide chain comprising the amino acid sequence designated “2755” as depicted in FIG. 4E; and b) a second polypeptide chain comprising the amino acid sequence designated “3158” as depicted in FIG. 4B.

[0323] In some cases, a TMMP of the present disclosure comprises: a) a first polypeptide chain comprising the amino acid sequence designated “2756” as depicted in FIG. 4F; and b) a second polypeptide chain comprising the amino acid sequence designated “3158” as depicted in FIG. 4B.

[0324] In some cases, a TMMP of the present disclosure comprises: a) a first polypeptide chain comprising the amino acid sequence designated “2757” as depicted in FIG. 4G; and b) a second polypeptide chain comprising the amino acid sequence designated “3158” as depicted in FIG. 4B.

[0325] In some cases, a TMMP of the present disclosure comprises: a) a first polypeptide chain comprising the amino acid sequence designated “2758” as depicted in FIG. 4H; and b) a second polypeptide chain comprising the amino acid sequence designated “3158” as depicted in FIG. 4B.

[0326] In some cases, a TMMP of the present disclosure comprises: a) a first polypeptide chain comprising the amino acid sequence designated “3156” as depicted in FIG. 4I; and b) a second polypeptide chain comprising the amino acid sequence designated “2764” as depicted in FIG. 4A.

[0327] In some cases, a TMMP of the present disclosure comprises: a) a first polypeptide chain comprising the amino acid sequence designated “3157” as depicted in FIG. 4J; and b) a second polypeptide chain comprising the amino acid sequence designated “2764” as depicted in FIG. 4A.

[0328] In some cases, a TMMP of the present disclosure comprises: a) a first polypeptide chain comprising the amino acid sequence designated “2754” as depicted in FIG. 4D; and b) a second polypeptide chain comprising the amino acid sequence designated “3159” as depicted in FIG. 4K.

[0329] In some cases, a TMMP of the present disclosure comprises: a) a first polypeptide chain comprising the amino acid sequence designated “2755” as depicted in FIG. 4E; and b) a second polypeptide chain comprising the amino acid sequence designated “3159” as depicted in FIG. 4K.

[0330] In some cases, a TMMP of the present disclosure comprises: a) a first polypeptide chain comprising the amino acid sequence designated “2756” as depicted in FIG. 4F; and b) a second polypeptide chain comprising the amino acid sequence designated “3159” as depicted in FIG. 4K.

[0331] In some cases, a TMMP of the present disclosure comprises: a) a first polypeptide chain comprising the amino acid sequence designated “2757” as depicted in FIG. 4G; and b) a second polypeptide chain comprising the amino acid sequence designated “3159” as depicted in FIG. 4K.

[0332] In some cases, a TMMP of the present disclosure comprises: a) a first polypeptide chain comprising the amino acid sequence designated “2758” as depicted in FIG. 4H; and b) a second polypeptide chain comprising the amino acid sequence designated “3159” as depicted in FIG. 4K.

[0333] In some cases, a TMMP of the present disclosure comprises: a) a first polypeptide chain comprising the amino acid sequence designated “2364” as depicted in FIG. 17A; and b) a second polypeptide chain comprising the amino acid sequence designated “1715” as depicted in FIG. 17A.

[0334] In some cases, a TMMP of the present disclosure comprises: a) a first polypeptide chain comprising the amino acid sequence designated “2760” as depicted in FIG. 17B; and b) a second polypeptide chain comprising the amino acid sequence designated “2405” as depicted in FIG. 17B.

[0335] In some cases, a TMMP of the present disclosure comprises: a) a first polypeptide chain comprising the amino acid sequence designated “2218” as depicted in FIG. 17C; and b) a second polypeptide chain comprising the amino acid sequence designated “1380” as depicted in FIG. 17C.

### Methods of Generating a Multimeric T-Cell Modulatory Polypeptide

[0336] The present disclosure provides a method of obtaining a TMMP comprising one or more variant immunomodulatory polypeptides that exhibit lower affinity for a cognate co-immunomodulatory polypeptide compared to the affinity of the corresponding parental wild-type immunomodulatory polypeptide for the co-immunomodulatory polypeptide, the method comprising: A) generating a library of TMMPs comprising a plurality of members, wherein each member comprises: a) a first polypeptide comprising: i) an epitope; and ii) a first major MHC polypeptide; and b) a second polypeptide comprising: i) a second MHC polypeptide; and ii) optionally an Ig Fc polypeptide or a non-Ig scaffold, wherein each member comprises a different variant immunomodulatory polypeptide on the first polypeptide, the second polypeptide, or both the first and the second polypeptide; B) determining the affinity of each member of the library for a cognate co-immunomodulatory polypeptide; and C) selecting a member that exhibits reduced affinity for the cognate co-immunomodulatory polypeptide. In some cases, the affinity is determined by bio-layer interferometry (BLI) using purified TMMP library members and the cognate co-immunomodulatory polypeptide. BLI methods are well known to those skilled in the art. A BLI assay is described above. See, e.g., Lad et al. (2015) J. Biomol. Screen. 20(4): 498-507; and Shah and Duncan (2014) J. Vis. Exp. 18:e51383.

[0337] The present disclosure provides a method of obtaining a TMMP that exhibits selective binding to a T-cell, the method comprising: A) generating a library of TMMPs comprising a plurality of members, wherein each member comprises: a) a first polypeptide comprising: i) an epitope; and ii) a first MHC polypeptide; and b) a second polypeptide comprising: i) a second MHC polypeptide; and ii) optionally an immunoglobulin (Ig) Fc polypeptide or a non-Ig scaffold, wherein each member comprises a different variant immunomodulatory polypeptide on the first polypeptide, the second polypeptide, or both the first and the second polypeptide, wherein the variant immunomodulatory polypeptide differs in amino acid sequence by from 1 amino acid to 10 amino acids from a parental wild-type immunomodulatory polypeptide; B) contacting a TMMP library member with a target T-cell expressing on its surface: i) a cognate co-immunomodulatory polypeptide that binds the parental wild-type immunomodulatory polypeptide; and ii) a T-cell receptor that binds to the epitope, wherein the TMMP library member comprises an epitope tag, such that the TMMP library member binds to the target T-cell; C) contacting the TMMP library member hound to the target T-cell with a fluorescently labeled binding agent that binds to the epitope tag, generating a TMMP library member/target T-cell/binding agent complex; D) measuring the mean fluorescence intensity (MFI) of the TMMP library member/target T-cell/binding agent complex using flow cytometry, wherein the MFI measured over a range of concentrations of the TMMP library member provides a measure of the affinity and apparent avidity; and E) selecting a TMMP library member that selectively binds the target T cell, compared to binding of the TMMP library member to a control T cell that comprises: i) the cognate co-immunomodulatory polypeptide that binds the parental wild-type immunomodulatory polypeptide; and ii) a T-cell receptor that binds to an epitope other than the epitope present in the TMMP library member. In some cases, a TMMP library member that is identified as selectively binds to a target T cell is isolated from the library.

[0338] In some cases, a parental wild-type immunomodulatory polypeptide and cognate immunomodulatory polypeptide pairs are selected from:

[0339] IL-2 and IL-2 receptor;

[0340] 4-1BBL and 4-1BB;

[0341] PD-L1 and PD-1;

[0342] CD70 and CD27;

[0343] TGFβ and TGFβ receptor;

[0344] CD80 and CD28;

[0345] CD86 and CD28;

[0346] OX40L and OX40;

[0347] FasL and Fas;

[0348] ICOS-L and ICOS;

[0349] ICAM and LFA-1;

[0350] JAG1 and Notch;

[0351] JAG1 and CD46;

[0352] CD80 and CTLA4; and

[0353] CD86 and CTLA4.

[0354] The present disclosure provides a method of obtaining a TMMP comprising one or more variant immunomodulatory polypeptides that exhibit reduced affinity for a cognate co-immunomodulatory polypeptide compared to the affinity of the corresponding parental wild-type immunomodulatory polypeptide for the co-immunomodulatory polypeptide, the method comprising selecting, from a library of TMMPs comprising a plurality of members, a member that exhibits reduced affinity for the cognate co-immunomodulatory polypeptide, wherein the plurality of member comprises: a) a first polypeptide comprising: i) an epitope; and ii) a first MHC polypeptide; and b) a second polypeptide comprising: i) a second MHC polypeptide; and ii) optionally an Ig Fc polypeptide or a non-Ig scaffold, wherein the members of the library comprise a plurality of variant immunomodulatory polypeptide present in the first polypeptide, the second polypeptide, or both the first and the second polypeptide. In some cases, the selecting step comprises determining the affinity, using bio-layer interferometry, of binding between TMMP library members and the cognate co-immunomodulatory polypeptide. In some cases, the TMMP is as described above.

[0355] In some cases, the method further comprises: a) contacting the selected TMMP library member with a target T-cell expressing on its surface: i) a cognate co-immunomodulatory polypeptide that binds the parental wild-type immunomodulatory polypeptide; and ii) a T-cell receptor that binds to the epitope, wherein the TMMP library member comprises an epitope tag, such that the TMMP library member binds to the target T-cell; b) contacting the selected TMMP library member bound to the target T-cell with a fluorescently labeled binding agent that binds to the epitope tag, generating a selected TMMP library member/target T-cell/binding agent complex; and c) measuring the mean fluorescence intensity (MFI) of the selected TMMP library member/target T-cell/binding agent complex using flow cytometry, wherein the MFI measured over a range of concentrations of the selected TMMP library member provides a measure of the affinity and apparent avidity. A selected TMMP library member that selectively binds the target T cell, compared to binding of the TMMP library member to a control T cell that comprises: i) the cognate co-immunomodulatory polypeptide that binds the parental wild-type immunomodulatory polypeptide; and ii) a T-cell receptor that binds to an epitope other than the epitope present in the TMMP library member, is identified as selectively binding to the target T cell. In some cases, the binding agent is an antibody specific for the epitope tag. In some cases, the variant immunomodulatory polypeptide comprises from 1 to 20 amino acid substitutions (e.g., 1, 2, 3, 4, 5, 6, 7, 8, 9, 10, 11, 12, 13, 14, 15, 16, 17, 18, 19, or 20 amino acid substitutions) compared to the corresponding parental wild-type immunomodulatory polypeptide. In some cases, the TMMP comprises two variant immunomodulatory polypeptides. In some cases, the two variant immunomodulatory polypeptides comprise the same amino acid sequence. In some cases, the first polypeptide comprises one of the two variant immunomodulatory polypeptides and wherein the second polypeptide comprises the second of the two variant immunomodulatory polypeptides. In some cases, the two variant immunomodulatory polypeptides are on the same polypeptide chain of the TMMP. In some cases, the two variant immunomodulatory polypeptides are on the first polypeptide of the TMMP. In some cases, the two variant immunomodulatory polypeptides are on the second polypeptide of the TMMP.

[0356] In some cases, the method further comprises isolating the selected TMMP library member from the library. In some cases, the method further comprises providing a nucleic acid comprising a nucleotide sequence encoding the selected TMMP library member. In some cases, the nucleic acid is present in a recombinant expression vector. In some cases, the nucleotide sequence is operably linked to a transcriptional control element that is functional in a eukaryotic cell. In some cases, the method further comprises introducing the nucleic acid into a eukaryotic host cell, and culturing the cell in a liquid medium to synthesize the encoded selected TMMP library member in the cell. In some cases, the method further comprises isolating the synthesized selected TMMP library member from the cell or from liquid culture medium comprising the cell. In some cases, the selected TMMP library member comprises an Ig Fe polypeptide. In some cases, the method further comprises conjugating a drug to the Ig Fc polypeptide. In some cases, the drug is a cytotoxic agent is selected from maytansinoid, benzodiazepine, taxoid, CC-1065, duocarmycin, a duocarmycin analog, calichcamicin, dolastatin, a dolastatin analog, auristatin, tomaymycin, and leptomycin, or a pro-drug of any one of the foregoing. In some cases, the drug is a retinoid. In some cases, the parental wild-type immunomodulatory polypeptide and the cognate immunomodulatory polypeptides are selected from: IL-2 and IL-2 receptor; 4-1BBL and 4-1BB; PD-L1 and PD-1; CD70 and CD27; TGFβ and TGFβ receptor; CD80 and CD28; CD86 and CD28; OX40L and OX40; FasL and Fas; ICOS-L and ICOS; ICAM and LFA-1; JAG1 and Notch; JAG1 and CD46; CD80 and CTLA4; and CD86 and CTLA4.

[0357] The present disclosure provides a method of obtaining a TMMP comprising one or more variant immunomodulatory polypeptides that exhibit reduced affinity for a cognate co-immunomodulatory polypeptide compared to the affinity of the corresponding parental wild-type immunomodulatory polypeptide for the co-immunomodulatory polypeptide, the method comprising: A) providing a library of TMMPs comprising a plurality of members, wherein the plurality of member comprises: a) a first polypeptide comprising: i) an epitope; and ii) a first MHC polypeptide; and b) a second polypeptide comprising: i) a second MHC polypeptide; and ii) optionally an Ig Fc polypeptide or a non-Ig scaffold, wherein the members of the library comprise a plurality of variant immunomodulatory polypeptide present in the first polypeptide, the second polypeptide, or both the first and the second polypeptide; and B) selecting from the library a member that exhibits reduced affinity for the cognate co-immunomodulatory polypeptide. In some cases, the selecting step comprises determining the affinity, using bio-layer interferometry, of binding between TMMP library members and the cognate co-immunomodulatory polypeptide. In some cases, the TMMP is as described above.

[0358] In some cases, the method further comprises: a) contacting the selected TMMP library member with a target T-cell expressing on its surface: i) a cognate co-immunomodulatory polypeptide that binds the parental wild-type immunomodulatory polypeptide; and ii) a T-cell receptor that binds to the epitope, wherein the TMMP library member comprises an epitope tag, such that the TMMP library member binds to the target T-cell; b) contacting the selected TMMP library member bound to the target T-cell with a fluorescently labeled binding agent that binds to the epitope tag, generating a selected TMMP library member/target T-cell/binding agent complex; and c) measuring the mean fluorescence intensity (MFI) of the selected TMMP library member/target T-cell/binding agent complex using flow cytometry, wherein the MFI measured over a range of concentrations of the selected TMMP library member provides a measure of the affinity and apparent avidity. A selected TMMP library member that selectively binds the target T cell, compared to binding of the TMMP library member to a control T cell that comprises: i) the cognate co-immunomodulatory polypeptide that binds the parental wild-type immunomodulatory polypeptide; and ii) a T-cell receptor that binds to an epitope other than the epitope present in the TMMP library member, is identified as selectively binding to the target T cell. In some cases, the binding agent is an antibody specific for the epitope tag. In some cases, the variant immunomodulatory polypeptide comprises from 1 to 20 amino acid substitutions (e.g., 1, 2, 3, 4, 5, 6, 7, 8, 9, 10, 11, 12, 13, 14, 15, 16, 17, 18, 19, or 20 amino acid substitutions) compared to the corresponding parental wild-type immunomodulatory polypeptide. In some cases, the TMMP comprises two variant immunomodulatory polypeptides. In some cases, the two variant immunomodulatory polypeptides comprise the same amino acid sequence. In some cases, the first polypeptide comprises one of the two variant immunomodulatory polypeptides and wherein the second polypeptide comprises the second of the two variant immunomodulatory polypeptides. In some cases, the two variant immunomodulatory polypeptides are on the same polypeptide chain of the TMMP. In some cases, the two variant immunomodulatory polypeptides are on the first polypeptide of the TMMP. In some cases, the two variant immunomodulatory polypeptides are on the second polypeptide of the TMMP.

[0359] In some cases, the method further comprises isolating the selected TMMP library member from the library. In some cases, the method further comprises providing a nucleic acid comprising a nucleotide sequence encoding the selected TMMP library member. In some cases, the nucleic acid is present in a recombinant expression vector. In some cases, the nucleotide sequence is operably linked to a transcriptional control element that is functional in a eukaryotic cell. In some cases, the method further comprises introducing the nucleic acid into a eukaryotic host cell, and culturing the cell in a liquid medium to synthesize the encoded selected TMMP library member in the cell. In some cases, the method further comprises isolating the synthesized selected TMMP library member from the cell or from liquid culture medium comprising the cell. In some cases, the selected TMMP library member comprises an Ig Fe polypeptide. In some cases, the method further comprises conjugating a drug to the Ig Fc polypeptide. In some cases, the drug is a cytotoxic agent is selected from maytansinoid, benzodiazepine, taxoid, CC-1065, duocarmycin, a duocarmycin analog, calicheamicin, dolastatin, a dolastatin analog, auristatin, tomaymycin, and leptomycin, or a pro-drug of any one of the foregoing. In some cases, the drug is a retinoid. In some cases, the parental wild-type immunomodulatory polypeptide and the cognate immunomodulatory polypeptides are selected from IL-2 and IL-2 receptor; 4-1BBL and 4-1BB; PD-L1 and PD-1; TGFβ and TGFβ receptor; CD80 and CD28; CD86 and CD28; OX40L and OX40; FasL and Fas; ICOS-L and ICOS; CD70 and CD27; ICAM and LFA-1; JAG1 and Notch; JAG1 and CD46; CD80 and CTLA4; and CD86 and CTLA4.

### Nucleic Acids

[0360] The present disclosure provides a nucleic acid comprising a nucleotide sequence encoding a TMMP of the present disclosure. The present disclosure provides a nucleic acid comprising a nucleotide sequence encoding a TMMP of the present disclosure.

[0361] The present disclosure provides nucleic acids comprising nucleotide sequences encoding a TMMP of the present disclosure. In some cases, the individual polypeptide chains of a TMMP of the present disclosure are encoded in separate nucleic acids. In some cases, all polypeptide chains of a TMMP of the present disclosure are encoded in a single nucleic acid. In some cases, a first nucleic acid comprises a nucleotide sequence encoding a first polypeptide of a TMMP of the present disclosure; and a second nucleic acid comprises a nucleotide sequence encoding a second polypeptide of a TMMP of the present disclosure. In some cases, single nucleic acid comprises a nucleotide sequence encoding a first polypeptide of a TMMP of the present disclosure and a second polypeptide of a TMMP of the present disclosure.

### Separate Nucleic Acids Encoding Individual Polypeptide Chains of a Multimeric Polypeptide

[0362] The present disclosure provides nucleic acids comprising nucleotide sequences encoding a TMMP of the present disclosure. As noted above, in some cases, the individual polypeptide chains of a TMMP of the present disclosure are encoded in separate nucleic acids. In some cases, nucleotide sequences encoding the separate polypeptide chains of a TMMP of the present disclosure are operably linked to transcriptional control elements, e.g., promoters, such as promoters that are functional in a eukaryotic cell, where the promoter can be a constitutive promoter or an inducible promoter.

[0363] The present disclosure provides a first nucleic acid and a second nucleic acid, where the first nucleic acid comprises a nucleotide sequence encoding a first polypeptide of a TMMP of the present disclosure, where the first polypeptide comprises, in order from N-terminus to C-terminus: a) an epitope (e.g., a T-cell epitope); b) a first MHC polypeptide; and c) an immunomodulatory polypeptide (e.g., a reduced-affinity variant, as described above); and where the second nucleic acid comprises a nucleotide sequence encoding a second polypeptide of a TMMP of the present disclosure, where the second polypeptide comprises, in order from N-terminus to C-terminus: a) a second MHC polypeptide; and b) an Ig Fc polypeptide. Suitable T-cell epitopes, MHC polypeptides, immunomodulatory polypeptides, and Ig Fe polypeptides, are described above. In some cases, the nucleotide sequences encoding the first and the second polypeptides are operably linked to transcriptional control elements. In some cases, the transcriptional control element is a promoter that is functional in a eukaryotic cell. In some cases, the nucleic acids are present in separate expression vectors.

[0364] The present disclosure provides a first nucleic acid and a second nucleic acid, where the first nucleic acid comprises a nucleotide sequence encoding a first polypeptide of a TMMP of the present disclosure, where the first polypeptide comprises, in order from N-terminus to C-terminus: a) an epitope (e.g., a T-cell epitope); and b) a first MHC polypeptide; and where the second nucleic acid comprises a nucleotide sequence encoding a second polypeptide of a TMMP of the present disclosure, where the second polypeptide comprises, in order from N-terminus to C-terminus: a) an immunomodulatory polypeptide (e.g., a reduced-affinity variant as described above); b) a second MHC polypeptide; and c) an Ig Fc polypeptide. Suitable T-cell epitopes, MHC polypeptides, immunomodulatory polypeptides, and Ig Fc polypeptides, are described above. In some cases, the nucleotide sequences encoding the first and the second polypeptides are operably linked to transcriptional control elements. In some cases, the transcriptional control element is a promoter that is functional in a eukaryotic cell. In some cases, the nucleic acids are present in separate expression vectors.

### Nucleic Acid Encoding Two or More Polypeptides Present in a Multimeric Polypeptide

[0365] The present disclosure provides a nucleic acid comprising nucleotide sequences encoding at least the first polypeptide and the second polypeptide of a TMMP of the present disclosure. In some cases, where a TMMP of the present disclosure includes a first, second, and third polypeptide, the nucleic acid includes a nucleotide sequence encoding the first, second, and third polypeptides. In some cases, the nucleotide sequences encoding the first polypeptide and the second polypeptide of a TMMP of the present disclosure includes a proteolytically cleavable linker interposed between the nucleotide sequence encoding the first polypeptide and the nucleotide sequence encoding the second polypeptide. In some cases, the nucleotide sequences encoding the first polypeptide and the second polypeptide of a TMMP of the present disclosure includes an internal ribosome entry site (IRES) interposed between the nucleotide sequence encoding the first polypeptide and the nucleotide sequence encoding the second polypeptide. In some cases, the nucleotide sequences encoding the first polypeptide and the second polypeptide of a TMMP of the present disclosure includes a ribosome skipping signal (or cis-acting hydrolase element, CHYSEL) interposed between the nucleotide sequence encoding the first polypeptide and the nucleotide sequence encoding the second polypeptide. Examples of nucleic acids are described below, where a proteolytically cleavable linker is provided between nucleotide sequences encoding the first polypeptide and the second polypeptide of a TMMP of the present disclosure; in any of these embodiments, an IRES or a ribosome skipping signal can be used in place of the nucleotide sequence encoding the proteolytically cleavable linker.

[0366] In some cases, a first nucleic acid (e.g., a recombinant expression vector, an mRNA, a viral RNA, etc.) comprises a nucleotide sequence encoding a first polypeptide chain of a TMMP of the present disclosure; and a second nucleic acid (e.g., a recombinant expression vector, an mRNA, a viral RNA, etc.) comprises a nucleotide sequence encoding a second polypeptide chain of a TMMP of the present disclosure. In some cases, the nucleotide sequence encoding the first polypeptide, and the second nucleotide sequence encoding the second polypeptide, are each operably linked to transcriptional control elements, e.g., promoters, such as promoters that are functional in a eukaryotic cell, where the promoter can be a constitutive promoter or an inducible promoter.

[0367] The present disclosure provides a nucleic acid comprising a nucleotide sequence encoding a recombinant polypeptide, where the recombinant polypeptide comprises, in order from N-terminus to C-terminus: a) an epitope (e.g., a T-cell epitope); b) a first MHC polypeptide; c) an immunomodulatory polypeptide (e.g., a reduced-affinity variant as described above); d) a proteolytically cleavable linker; e) a second MHC polypeptide; and f) an immunoglobulin (Ig) Fc polypeptide. The present disclosure provides a nucleic acid comprising a nucleotide sequence encoding a recombinant polypeptide, where the recombinant polypeptide comprises, in order from N-terminus to C-terminus: a) a first leader peptide; b) the epitope; c) the first MHC polypeptide; d) the immunomodulatory polypeptide (e.g., a reduced-affinity variant as described above); e) the proteolytically cleavable linker; f) a second leader peptide; g) the second MHC polypeptide; and h) the Ig Fc polypeptide. The present disclosure provides a nucleic acid comprising a nucleotide sequence encoding a recombinant polypeptide, where the recombinant polypeptide comprises, in order from N-terminus to C-terminus: a) an epitope; b) a first MHC polypeptide; c) a proteolytically cleavable linker; d) an immunomodulatory polypeptide (e.g., a reduced-affinity variant as described above); e) a second MHC polypeptide; and f) an Ig Fc polypeptide. In some cases, the first leader peptide and the second leader peptide are a β2-M leader peptide. In some cases, the nucleotide sequence is operably linked to a transcriptional control element. In some cases, the transcriptional control element is a promoter that is functional in a eukaryotic cell.

[0368] Suitable MHC polypeptides are described above. In some cases, the first MHC polypeptide is β2-microglobulin polypeptide; and wherein the second MHC polypeptide is an MHC class I heavy chain polypeptide. In some cases, the β2-microglobulin polypeptide comprises an amino acid sequence having at least 85% amino acid sequence identity to a β2M amino acid sequence depicted in FIG. 6. In some cases, the MHC class I heavy chain polypeptide is an HLA-A, HLA-B, HLA-C, HLA-E, HLA-F, HLA-G, HLA-K, or HLA-L heavy chain.

[0369] Suitable Fc polypeptides are described above. In some cases, the Ig Fc polypeptide is an IgG1 Fc polypeptide, an IgG2 Fc polypeptide, an IgG3 Fc polypeptide, an IgG4 Fc polypeptide, an IgA Fe polypeptide, or an IgM Fc polypeptide. In some cases, the Ig Fc polypeptide comprises an amino acid sequence having at least 85% amino acid sequence identity to an amino acid sequence depicted in FIGS. 5A-5G.

[0370] Suitable immunomodulatory polypeptides are described above.

[0371] Suitable proteolytically cleavable linkers are described above. In some cases, the proteolytically cleavable linker comprises an amino acid sequence selected from: a) LEVLFQGP (SEQ ID NO:388); b) ENLYTQS (SEQ ID NO:389); c) DDDDK (SEQ ID NO:390); d) LVPR (SEQ ID NO:391); and e) GSGATNFSLLKQAGDVEENPGP (SEQ ID NO:392).

[0372] In some cases, a linker between the epitope and the first MHC polypeptide comprises a first Cys residue, and the second MHC polypeptide comprises an amino acid substitution to provide a second Cys residue, such that the first and the second Cys residues provide for a disulfide linkage between the linker and the second MHC polypeptide. In some cases, first MHC polypeptide comprises an amino acid substitution to provide a first Cys residue, and the second MHC polypeptide comprises an amino acid substitution to provide a second Cys residue, such that the first Cys residue and the second Cys residue provide for a disulfide linkage between the first MHC polypeptide and the second MHC polypeptide.

### Recombinant Expression Vectors

[0373] The present disclosure provides recombinant expression vectors comprising nucleic acids of the present disclosure. In some cases, the recombinant expression vector is a non-viral vector. In some cases, the recombinant expression vector is a viral construct, e.g., a recombinant adeno-associated virus construct (see, e.g., U.S. Pat. No. 7,078,387), a recombinant adenoviral construct, a recombinant lentiviral construct, a recombinant retroviral construct, a non-integrating viral vector, etc.

[0374] Suitable expression vectors include, but are not limited to, viral vectors (e.g. viral vectors based on vaccinia virus; poliovirus; adenovirus (see, e.g., Li et al., Invest Opthalmol Vis Sci 35:2543 2549, 1994; Borras et al., Gene Ther 6:515 524, 1999; Li and Davidson, PNAS 92:7700 7704, 1995; Sakamoto et al., H Gene Ther 5:1088 1097, 1999; WO 94/12649, WO 93/03769; WO 93/19191; WO 94/28938; WO 95/11984 and WO 95/00655); adeno-associated virus (see, e.g., Ali et al., Hum Gene Ther 9:81 86, 1998, Flannery et al., PNAS 94:6916 6921, 1997; Bennett et al., Invest Opthalmol Vis Sci 38:2857 2863, 1997; Jomary et al., Gene Ther 4:683 690. 1997, Rolling et al., Hum Gene Ther 10:641 648, 1999; Ali et al., Hum Mol Genet 5:591 594, 1996; Srivastava in WO 93/09239, Samulski et al., J. Vir. (1989) 63:3822-3828; Mendelson et al., Virol. (1988) 166:154-165; and Flotte et al., PNAS (1993) 90:10613-10617); SV40; herpes simplex virus; human immunodeficiency virus (see, e.g., Miyoshi et al., PNAS 94:10319 23, 1997; Takahashi et al., J Virol 73:7812 7816, 1999); a retroviral vector (e.g., Murine Leukemia Virus, spleen necrosis virus, and vectors derived from retroviruses such as Rous Sarcoma Virus, Harvey Sarcoma Virus, avian leukosis virus, a lentivirus, human immunodeficiency virus, myeloproliferative sarcoma virus, and mammary tumor virus); and the like.

[0375] Numerous suitable expression vectors are known to those of skill in the art, and many are commercially available. The following vectors are provided by way of example; for eukaryotic host cells: pXT1, pSG5 (Stratagene), pSVK3, pBPV, pMSG, and pSVLSV40 (Pharmacia). However, any other vector may be used so long as it is compatible with the host cell.

[0376] Depending on the host/vector system utilized, any of a number of suitable transcription and translation control elements, including constitutive and inducible promoters, transcription enhancer elements, transcription terminators, etc. may be used in the expression vector (see e.g., Bitter et al. (1987) Methods in Enzymology, 153:516-544).

[0377] In some cases, a nucleotide sequence encoding a DNA-targeting RNA and/or a site-directed modifying polypeptide is operably linked to a control element, e.g., a transcriptional control element, such as a promoter. The transcriptional control element may be functional in either a eukaryotic cell. e.g., a mammalian cell; or a prokaryotic cell (e.g., bacterial or archaeal cell). In some cases, a nucleotide sequence encoding a DNA-targeting RNA and/or a site-directed modifying polypeptide is operably linked to multiple control elements that allow expression of the nucleotide sequence encoding a DNA-targeting RNA and/or a site-directed modifying polypeptide in both prokaryotic and eukaryotic cells.

[0378] Non-limiting examples of suitable eukaryotic promoters (promoters functional in a eukaryotic cell) include those from cytomegalovirus (CMV) immediate early, herpes simplex virus (HSV) thymidine, kinase, early and late SV40, long terminal repeats (LTRs) from retrovirus, and mouse metallothionein-I. Selection of the appropriate vector and promoter is well within the level of ordinary skill in the art. The expression vector may also contain a ribosome binding site for translation initiation and a transcription terminator. The expression vector may also include appropriate sequences for amplifying expression.

### Genetically Modified Host Cells

[0379] The present disclosure provides a genetically modified host cell, where the host cell is genetically modified with a nucleic acid of the present disclosure.

[0380] Suitable host cells include eukaryotic cells, such as yeast cells, insect cells, and mammalian cells. In some cases, the host cell is a cell of a mammalian cell line. Suitable mammalian cell lines include human cell lines, non-human primate cell lines, rodent (e.g., mouse, rat) cell tines, and the like. Suitable mammalian cell lines include, but are not limited to, HeLa cells (e.g., American Type Culture Collection (ATCC) No. CCL-2), CHO cells (e.g., ATCC Nos. CRL9618, CCL61, CRL9096), 293 cells (e.g., ATCC No. CRL-1573), Vero cells, NIH 3T3 cells (e.g., ATCC No. CRL-1658), Huh-7 cells, BHK cells (e.g., ATCC No. CCL10), PC12 cells (ATCC No. CRL1721), COS cells, COS-7 cells (ATCC No. CRL1651), RAT1 cells, mouse L cells (ATCC No. CCLI.3), human embryonic kidney (HEK) cells (ATCC No. CRL1573), HLHepG2 cells, and the like.

[0381] In some cases, the host cell is a mammalian cell that has been genetically modified such that it does not synthesize endogenous MHC β2-M.

[0382] In some cases, the host cell is a mammalian cell that has been genetically modified such that it does not synthesize endogenous MHC Class I heavy chain. In some cases, the host cell is a mammalian cell that has been genetically modified such that it does not synthesize endogenous MHC β2-M and such that it does not synthesize endogenous MHC Class I heavy chain.

### Compositions

[0383] The present disclosure provides compositions, including pharmaceutical compositions, comprising a TMMP (synTac) of the present disclosure. The present disclosure provides compositions, including pharmaceutical compositions, comprising a TMMP of the present disclosure. The present disclosure provides compositions, including pharmaceutical compositions, comprising a nucleic acid or a recombinant expression vector of the present disclosure.

### Compositions Comprising a Multimeric Polypeptide

[0384] A composition of the present disclosure can comprise, in addition to a TMMP of the present disclosure, one or more of: a salt, e.g., NaCl, MgCl₂, KCl, MgSO₄, etc.; a buffering agent, e.g., a Tris buffer, N-(2-Hydroxyethyl)piperazine-N′-(2-ethanesulfonic acid) (HEPES), 2-(N-Morpholino)ethanesulfonic acid (MES), 2-(N-Morpholino)ethanesulfonic acid sodium salt (MES), 3-(N-Morpholino)propanesulfonic acid (MOPS), N-tris[Hydroxymethyl]methyl-3-aminopropanesulfonic acid (TAPS), etc.; a solubilizing agent; a detergent, e.g., a non-ionic detergent such as Tween-20, etc.; a protease inhibitor; glycerol; and the like.

[0385] The composition may comprise a pharmaceutically acceptable excipient, a variety of which are known in the art and need not be discussed in detail herein. Pharmaceutically acceptable excipients have been amply described in a variety of publications, including, for example, “Remington: The Science and Practice of Pharmacy”, 19^{th} Ed. (1995), or latest edition, Mack Publishing Co; A. Gennaro (2000) “Remington: The Science and Practice of Pharmacy”, 20th edition, Lippincott, Williams, & Wilkins; Pharmaceutical Dosage Forms and Drug Delivery Systems (1999) H. C. Ansel et al., eds 7^{th} ed., Lippincott, Williams, & Wilkins; and Handbook of Pharmaceutical Excipients (2000) A. H. Kibbe et al., eds., 3^{rd} ed. Amer. Pharmaceutical Assoc.

[0386] A pharmaceutical composition can comprise a TMMP of the present disclosure, and a pharmaceutically acceptable excipient. In some cases, a subject pharmaceutical composition will be suitable for administration to a subject, e.g., will be sterile. For example, in some cases, a subject pharmaceutical composition will be suitable for administration to a human subject, e.g., where the composition is sterile and is free of detectable pyrogens and/or other toxins.

[0387] The protein compositions may comprise other components, such as pharmaceutical grades of mannitol, lactose, starch, magnesium stearate, sodium saccharin, talcum, cellulose, glucose, sucrose, magnesium, carbonate, and the like. The compositions may contain pharmaceutically acceptable auxiliary substances as required to approximate physiological conditions such as pH adjusting and buffering agents, toxicity adjusting agents and the like, for example, sodium acetate, sodium chloride, potassium chloride, calcium chloride, sodium lactate, hydrochloride, sulfate salts, solvates (e.g., mixed ionic salts, water, organics), hydrates (e.g., water), and the like.

[0388] For example, compositions may include aqueous solution, powder form, granules, tablets, pills, suppositories, capsules, suspensions, sprays, and the like. The composition may be formulated according to the various routes of administration described below.

[0389] Where a TMMP of the present disclosure is administered as an injectable (e.g. subcutaneously, intraperitoneally, intramuscularly, and/or intravenously) directly into a tissue, a formulation can be provided as a ready-to-use dosage form, or as non-aqueous form (e.g. a reconstitutable storage-stable powder) or aqueous form, such as liquid composed of pharmaceutically acceptable carriers and excipients. The protein-containing formulations may also be provided so as to enhance serum half-life of the TMMP following administration. For example, the TMMP may be provided in a liposome formulation, prepared as a colloid, or other conventional techniques for extending serum half-life. A variety of methods are available for preparing liposomes, as described in, e.g., Szoka et al. 1980 Ann. Rev. Biophys. Bioeng. 9:467, U.S. Pat. Nos. 4,235,871, 4,501,728 and 4,837,028. The preparations may also be provided in controlled release or slow-release forms.

[0390] Other examples of formulations suitable for parenteral administration include isotonic sterile injection solutions, anti-oxidants, bacteriostats, and solutes that render the formulation isotonic with the blood of the intended recipient, suspending agents, solubilizers, thickening agents, stabilizers, and preservatives. For example, a subject pharmaceutical composition can be present in a container, e.g., a sterile container, such as a syringe. The formulations can be presented in unit-dose or multi-dose sealed containers, such as ampules and vials, and can be stored in a freeze-dried (lyophilized) condition requiring only the addition of the sterile liquid excipient, for example, water, for injections, immediately prior to use. Extemporaneous injection solutions and suspensions can be prepared from sterile powders, granules, and tablets.

[0391] The concentration of a TMMP of the present disclosure in a formulation can vary widely (e.g., from less than about 0.1%, usually at or at least about 2% to as much as 20% to 50% or more by weight) and will usually be selected primarily based on fluid volumes, viscosities, and patient-based factors in accordance with the particular mode of administration selected and the patient's needs.

[0392] The present disclosure provides a container comprising a composition of the present disclosure, e.g., a liquid composition. The container can be, e.g., a syringe, an ampoule, and the like. In some cases, the container is sterile. In some cases, both the container and the composition are sterile.

[0393] The present disclosure provides compositions, including pharmaceutical compositions, comprising a TMMP of the present disclosure. A composition can comprise: a) a TMMP of the present disclosure; and b) an excipient, as described above. In some cases, the excipient is a pharmaceutically acceptable excipient.

[0394] In some cases, a TMMP of the present disclosure is present in a liquid composition. Thus, the present disclosure provides compositions (e.g., liquid compositions, including pharmaceutical compositions) comprising a TMMP of the present disclosure. In some cases, a composition of the present disclosure comprises: a) a TMMP of the present disclosure; and b) saline (e.g., 0.9% NaCl). In some cases, the composition is sterile. In some cases, the composition is suitable for administration to a human subject, e.g., where the composition is sterile and is free of detectable pyrogens and/or other toxins. Thus, the present disclosure provides a composition comprising: a) a TMMP of the present disclosure; and b) saline (e.g., 0.9% NaCl), where the composition is sterile and is free of detectable pyrogens and/or other toxins.

### Compositions Comprising a Nucleic Acid or a Recombinant Expression Vector

[0395] The present disclosure provides compositions, e.g., pharmaceutical compositions, comprising a nucleic acid or a recombinant expression vector of the present disclosure. A wide variety of pharmaceutically acceptable excipients is known in the art and need not be discussed in detail herein. Pharmaceutically acceptable excipients have been amply described in a variety of publications, including, for example, A. Gennaro (2000) “Remington: The Science and Practice of Pharmacy”, 20th edition, Lippincott, Williams, & Wilkins; Pharmaceutical Dosage Forms and Drug Delivery Systems (1999) H. C. Ansel et al., eds 7^{th} ed., Lippincott, Williams, & Wilkins; and Handbook of Pharmaceutical Excipients (2000) A. H. Kibbe et al., eds., 3^{rd} ed. Amer. Pharmaceutical Assoc.

[0396] A composition of the present disclosure can include: a) one or more nucleic acids or one or more recombinant expression vectors comprising nucleotide sequences encoding a TMMP; and b) one or more of: a buffer, a surfactant, an antioxidant, a hydrophilic polymer, a dextrin, a chelating agent, a suspending agent, a solubilizer, a thickening agent, a stabilizer, a bacteriostatic agent, a wetting agent, and a preservative. Suitable buffers include, but are not limited to, (such as N,N-bis(2-hydroxyethyl)-2-aminoethanesulfonic acid (BES), bis(2-hydroxyethyl)amino-tris(hydroxymethyl)methane (BIS-Tris), N-(2-hydroxyethyl)piperazine-N′3-propanesulfonic acid (EPPS or HEPPS), glycylglycine, N-2-hydroxyethylpiperazine-N′-2-ethanesulfonic acid (HEPES), 3-(N-morpholino)propane sulfonic acid (MOPS), piperazine-N,N′-bis(2-ethane-sulfonic acid) (PIPES), sodium bicarbonate, 3-(N-tris(hydroxymethyl)-methyl-amino-2-hydroxy-propanesulfonic acid) TAPSO, (N-tris(hydroxymethyl)methyl-2-aminoethanesulfonic acid (TES), N-tris(hydroxymethyl)methyl-glycine (Tricine), tris(hydroxymethyl)-aminomethane (Tris), etc.). Suitable salts include, e.g., NaCl, MgCl₂, KCl, MgSO₄, etc.

[0397] A pharmaceutical formulation of the present disclosure can include a nucleic acid or recombinant expression vector of the present disclosure in an amount of from about 0.001% to about 90% (w/w). In the description of formulations, below, “subject nucleic acid or recombinant expression vector” will be understood to include a nucleic acid or recombinant expression vector of the present disclosure. For example, in some cases, a subject formulation comprises a nucleic acid or recombinant expression vector of the present disclosure.

[0398] A subject nucleic acid or recombinant expression vector can be admixed, encapsulated, conjugated or otherwise associated with other compounds or mixtures of compounds; such compounds can include, e.g., liposomes or receptor-targeted molecules. A subject nucleic acid or recombinant expression vector can be combined in a formulation with one or more components that assist in uptake, distribution and/or absorption.

[0399] A subject nucleic acid or recombinant expression vector composition can be formulated into any of many possible dosage forms such as, but not limited to, tablets, capsules, gel capsules, liquid syrups, soft gels, suppositories, and enemas. A subject nucleic acid or recombinant expression vector composition can also be formulated as suspensions in aqueous, non-aqueous or mixed media. Aqueous suspensions may further contain substances which increase the viscosity of the suspension including, for example, sodium carboxymethylcellulose, sorbitol and/or dextran. The suspension may also contain stabilizers.

[0400] A formulation comprising a subject nucleic acid or recombinant expression vector can be a liposomal formulation. As used herein, the term “liposome” means a vesicle composed of amphiphilic lipids arranged in a spherical bilayer or bilayers. Liposomes are unilamellar or multilamellar vesicles which have a membrane formed from a lipophilic material and an aqueous interior that contains the composition to be delivered. Cationic liposomes are positively charged liposomes that can interact with negatively charged DNA molecules to form a stable complex. Liposomes that are pH sensitive or negatively charged are believed to entrap DNA rather than complex with it. Both cationic and noncationic liposomes can be used to deliver a subject nucleic acid or recombinant expression vector.

[0401] Liposomes also include “sterically stabilized” liposomes, a term which, as used herein, refers to liposomes comprising one or more specialized lipids that, when incorporated into liposomes, result in enhanced circulation lifetimes relative to liposomes lacking such specialized lipids. Examples of sterically stabilized liposomes are those in which part of the vesicle-forming lipid portion of the liposome comprises one or more glycolipids or is derivatized with one or more hydrophilic polymers, such as a polyethylene glycol (PEG) moiety. Liposomes and their uses are further described in U.S. Pat. No. 6,287,860, which is incorporated herein by reference in its entirety.

[0402] The formulations and compositions of the present disclosure may also include surfactants. The use of surfactants in drug products, formulations and in emulsions is well known in the art. Surfactants and their uses are further described in U.S. Pat. No. 6,287,860.

[0403] In one embodiment, various penetration enhancers are included, to effect the efficient delivery of nucleic acids. In addition to aiding the diffusion of non-lipophilic drugs across cell membranes, penetration enhancers also enhance the permeability of lipophilic drugs. Penetration enhancers may be classified as belonging to one of five broad categories, i.e., surfactants, fatty acids, bile salts, chelating agents, and non-chelating non-surfactants. Penetration enhancers and their uses are further described in U.S. Pat. No. 6,287,860, which is incorporated herein by reference in its entirety.

[0404] Compositions and formulations for oral administration include powders or granules, microparticulates, nanoparticulates, suspensions or solutions in water or non-aqueous media, capsules, gel capsules, sachets, tablets, or minitablets. Thickeners, flavoring agents, diluents, emulsifiers, dispersing aids or binders may be desirable. Suitable oral formulations include those in which a subject antisense nucleic acid is administered in conjunction with one or more penetration enhancers surfactants and chelators. Suitable surfactants include, but are not limited to, fatty acids and/or esters or salts thereof, bile acids and/or salts thereof. Suitable bile acids/salts and fatty acids and their uses are further described in U.S. Pat. No. 6,287,860. Also suitable are combinations of penetration enhancers, for example, fatty acids/salts in combination with bile acids/salts. An exemplary suitable combination is the sodium salt of lauric acid, capric acid, and UDCA. Further penetration enhancers include, but are not limited to, polyoxyethylene-9-lauryl ether, and polyoxyethylene-20-cetyl ether. Suitable penetration enhancers also include propylene glycol, dimethylsulfoxide, triethanoiamine, N,N-dimethylacetamide, N,N-dimethylformamide, 2-pyrrolidone and derivatives thereof, tetrahydrofurfuryl alcohol, and AZONE™.

### Methods of Modulating T Cell Activity

[0405] The present disclosure provides a method of selectively modulating the activity of an epitope-specific T cell, the method comprising contacting the T cell with a TMMP of the present disclosure, where contacting the T cell with a TMMP of the present disclosure selectively modulates the activity of the epitope-specific T cell. In some cases, the contacting occurs in vitro. In some cases, the contacting occurs in vivo. In some cases, the contacting occurs ex: vivo.

[0406] In some cases, e.g., where the target T cell is a CD8⁺ T cell, the TMMP comprises Class I MHC polypeptides (e.g., β2-microglobulin and Class I MHC heavy chain).

[0407] Where a TMMP of the present disclosure includes an immunomodulatory polypeptide that is an activating polypeptide, contacting the T cell with the TMMP activates the epitope-specific T cell. In some instances, the epitope-specific T cell is a T cell that is specific for an epitope present on a cancer cell, and contacting the epitope-specific T cell with the TMMP increases cytotoxic activity of the T cell toward the cancer cell. In some instances, the epitope-specific T cell is a T cell that is specific for an epitope present on a cancer cell, and contacting the epitope-specific T cell with the TMMP increases the number of the epitope-specific T cells.

[0408] In some instances, the epitope-specific T cell is a T cell that is specific for an epitope present on a virus-infected cell, and contacting the epitope-specific T cell with the TMMP increases cytotoxic activity of the T cell toward the virus-infected cell. In some instances, the epitope-specific T cell is a T cell that is specific for an epitope present on a virus-infected cell, and contacting the epitope-specific T cell with the TMMP increases the number of the epitope-specific T cells.

[0409] Where a TMMP of the present disclosure includes an immunomodulatory polypeptide that is an inhibiting polypeptide, contacting the T cell with the TMMP inhibits the epitope-specific T cell. In some instances, the epitope-specific T cell is a self-reactive T cell that is specific for an epitope present in a self antigen, and the contacting reduces the number of the self-reactive T cells.

[0410] The present disclosure provides a method of modulating an immune response in an individual, the method comprising administering to the individual an effective amount of a TMMP of the present disclosure. Administering the TMMP induces an epitope-specific T cell response (e.g., an AFP epitope-specific T-cell response) and an epitope-non-specific T cell response, where the ratio of the epitope-specific T cell response to the epitope-non-specific T cell response is at least 2:1. In some cases, the ratio of the epitope-specific T cell response to the epitope-non-specific T cell response is at least 5:1. In some cases, the ratio of the epitope-specific T cell response to the epitope-non-specific T cell response is at least 10:1. In some cases, the ratio of the epitope-specific T cell response to the epitope-non-specific T cell response is at least 25:1. In some cases, the ratio of the epitope-specific T cell response to the epitope-non-specific T cell response is at least 50:1. In some cases, the ratio of the epitope-specific T cell response to the epitope-non-specific T cell response is at least 100:1. In some cases, the individual is a human. In some cases, the modulating increases a cytotoxic T-cell response to a cancer cell, e.g., an AFP-expressing cancer cell. In some cases, the administering is intravenous, subcutaneous, intramuscular, systemic, intralymphatic, distal to a treatment site, local, or at or near a treatment site.

[0411] The present disclosure provides a method of delivering a costimulatory immunomodulatory) polypeptide selectively to target T cell, the method comprising contacting a mixed population of T cells with a TMMP of the present disclosure, where the mixed population of T cells comprises the target T cell and non-target T cells, where the target T cell is specific for the epitope present within the TMMP (e.g., where the target T cell is specific for the AFP epitope present within the TMMP), and where the contacting step delivers the one or more costimulatory polypeptides (immunomodulatory polypeptides) present within the TMMP to the target T cell. In some cases, the population of T cells is in vitro. In some cases, the population of T cells is in vivo in an individual. In some cases, the method comprises administering the TMMP to the individual. In some case, the T cell is a cytotoxic T cell. In some cases, the mixed population of T cells is an in vitro population of mixed T cells obtained from an individual, and the contacting step results in activation and/or proliferation of the target T cell, generating a population of activated and/or proliferated target T cells; in some of these instances, the method further comprises administering the population of activated and/or proliferated target T cells to the individual.

[0412] The present disclosure provides a method of detecting, in a mixed population of T cells obtained from an individual, the presence of a target T cell that binds an epitope of interest (e.g., an AFP epitope), the method comprising: a) contacting in vitro the mixed population of T cells with a TMMP of the present disclosure, wherein the TMMP comprises the epitope of interest (e.g., the AFP epitope); and b) detecting activation and/or proliferation of T cells in response to said contacting, wherein activated and/or proliferated T cells indicates the presence of the target T cell.

### Treatment Methods

[0413] The present disclosure provides a method of treatment of an individual, the method comprising administering to the individual an amount of a TMMP of the present disclosure, or one or more nucleic acids encoding the TMMP, effective to treat the individual. Also provided is a TMMP of the present disclosure for use in a method of treatment of the human or animal body. In some cases, a treatment method of the present disclosure comprises administering to an individual in need thereof one or more recombinant expression vectors comprising nucleotide sequences encoding a TMMP of the present disclosure. In some cases, a treatment method of the present disclosure comprises administering to an individual in need thereof one or more mRNA molecules comprising nucleotide sequences encoding a TMMP of the present disclosure. In some cases, a treatment method of the present disclosure comprises administering to an individual in need thereof a TMMP of the present disclosure. Conditions that can be treated include, e.g., cancer and autoimmune disorders, as described below.

[0414] In some cases, a TMMP of the present disclosure, when administered to an individual in need thereof, induces both an epitope-specific T cell response and an epitope non-specific T cell response. In other words, in some cases, a TMMP of the present disclosure, when administered to an individual in need thereof, induces an epitope-specific T cell response by modulating the activity of a first T cell that displays both: i) a TCR specific for the epitope present in the TMMP; ii) a co-immunomodulatory polypeptide that binds to the immunomodulatory polypeptide present in the TMMP; and induces an epitope non-specific T cell response by modulating the activity of a second T cell that displays: i) a TCR specific for an epitope other than the epitope present in the TMMP; and ii) a co-immunomodulatory polypeptide that binds to the immunomodulatory polypeptide present in the TMMP. The ratio of the epitope-specific T cell response to the epitope-non-specific T cell response is at least 2:1, at least 5:1, at least 10:1, at least 15:1, at least 20:1, at least 25:1, at least 50:1, or at least 100:1. The ratio of the epitope-specific T cell response to the epitope-non-specific T cell response is from about 2:1 to about 5:1, from about 5:1 to about 10:1, from about 10:1 to about 15:1, from about 15:1 to about 20:1, from about 20:1 to about 25:1, from about 25:1 to about 50:1, or from about 50:1 to about 100:1, or more than 100:1. “Modulating the activity” of a T cell can include one or more of: i) activating a cytotoxic (e.g., CD8⁺) T cell; ii) inducing cytotoxic activity of a cytotoxic (e.g., CD8⁺) T cell; iii) inducing production and release of a cytotoxin (e.g., a perforin; a granzyme; a granulysin) by a cytotoxic (e.g., CD8⁺) T cell; iv) inhibiting activity of an autoreactive T cell; and the like.

[0415] The combination of the reduced affinity of the immunomodulatory polypeptide for its cognate co-immunomodulatory polypeptide, and the affinity of the epitope for a TCR, provides for enhanced selectivity of a TMMP of the present disclosure. Thus, for example, a TMMP of the present disclosure binds with higher avidity to a first T cell that displays both: i) a TCR specific for the epitope present in the TMMP; and ii) a co-immunomodulatory polypeptide that binds to the immunomodulatory polypeptide present in the TMMP, compared to the avidity to which it binds to a second T cell that displays: i) a TCR specific for an epitope other than the epitope present in the TMMP; and ii) a co-immunomodulatory polypeptide that binds to the immunomodulatory polypeptide present in the TMMP.

[0416] The present disclosure provides a method of selectively modulating the activity of an epitope-specific T cell in an individual, the method comprising administering to the individual an effective amount of a TMMP of the present disclosure, or one or more nucleic acids (e.g., expression vectors; mRNA; etc.) comprising nucleotide sequences encoding the TMMP, where the TMMP selectively modulates the activity of the epitope-specific T cell in the individual. Selectively modulating the activity of an epitope-specific T cell can treat a disease or disorder in the individual. Thus, the present disclosure provides a treatment method comprising administering to an individual in need thereof an effective amount of a TMMP of the present disclosure.

[0417] In some cases, the immunomodulatory polypeptide (“MOD”) is an activating polypeptide, and the TMMP activates the epitope-specific T cell. In some cases, the epitope is a cancer-associated epitope, and the TMMP increases the activity of a T cell specific for the cancer-associate epitope. In some cases, the MOD is an activating polypeptide, and the TMMP activates an AFP epitope-specific T-cell. In some cases, the T cells are T-helper cells (CD4⁺ cells), cytotoxic T-cells (CD8⁺ cells), or NK-T-cells. In some cases, the epitope is an AFP epitope, and the TMMP increases the activity of a T-cell specific for a cancer cell expressing the AFP epitope (e.g., T-helper cells (CD4⁺ cells), cytotoxic T-cells (CD8⁺ cells), and/or NK-T-cells). Activation of CD4⁺ T cells can include increasing proliferation of CD4⁺ T cells and/or inducing or enhancing release cytokines by CD4⁺ T cells. Activation of NK-T-cells and/or CD8+ cells can include: increasing proliferation of NK-T-cells and/or CD8+ cells; and/or inducing release of cytokines such as interferon γ by NK-T-cells and/or CD8+ cells. In some cases, a TMMP of the present disclosure reduces proliferation and/or activity of a regulatory T (Treg) cell. Tregs are FoxP3⁺, CD4⁺ T cells. In some cases, e.g., where a TMMP of the present disclosure comprises an inhibitory immunomodulatory polypeptide (e.g., PD-L1, FasL, and the like), the TMMP reduces the proliferation and/or activity of a Treg.

[0418] Where a TMMP of the present disclosure comprises an AFP peptide epitope, the TMMP can be administered to an individual having an AFP-expressing cancer. Where a TMMP of the present disclosure comprises an AFP peptide epitope, the TMMP can be administered to an individual in need thereof to treat pancreatic cancer in the individual. Where a TMMP of the present disclosure comprises an AFP peptide epitope, the TMMP can be administered to an individual in need thereof to treat hepatocellular carcinoma (HCC) in the individual. Where a TMMP of the present disclosure comprises an AFP peptide epitope, the TMMP can be administered to an individual in need thereof to treat stomach cancer in the individual. Where a TMMP of the present disclosure comprises an AFP peptide epitope, the TMMP can be administered to an individual in need thereof to treat colorectal cancer (CRC) in the individual. Where a TMMP of the present disclosure comprises an AFP peptide epitope, the TMMP can be administered to an individual in need thereof to treat a hepatoblastoma in the individual. Where a TMMP of the present disclosure comprises an AFP peptide epitope, the TMMP can be administered to an individual in need thereof to treat an ovarian yolk sac tumor in the individual.

[0419] The present disclosure provides a method of treating cancer in an individual, the method comprising administering to the individual an effective amount of a TMMP of the present disclosure, or one or more nucleic acids (e.g., expression vectors; mRNA; etc.) comprising nucleotide sequences encoding the TMMP, where the TMMP comprises a T-cell epitope that is a cancer epitope, and where the TMMP comprises a stimulatory immunomodulatory polypeptide. In some cases, an “effective amount” of a TMMP of the present disclosure is an amount that, when administered in one or more doses to an individual in need thereof, reduces the number of cancer cells in the individual. For example, in some cases, an “effective amount” of a TMMP of the present disclosure is an amount that, when administered in one or more doses to an individual in need thereof, reduces the number of cancer cells in the individual by at least 10%, at least 15%, at least 20%, at least 25%, at least 30%, at least 40%, at least 50%, at least 60%, at least 70%, at least 80%, at least 90%, or at least 95%, compared to the number of cancer cells in the individual before administration of the TMMP, or in the absence of administration with the TMMP. In some cases, an “effective amount” of a TMMP of the present disclosure is an amount that, when administered in one or more doses to an individual in need thereof, reduces the number of cancer cells in the individual to undetectable levels.

[0420] In some cases, an “effective amount” of a TMMP of the present disclosure is an amount that, when administered in one or more doses to an individual in need thereof, reduces the tumor mass in the individual. For example, in some cases, an “effective amount” of a TMMP of the present disclosure is an amount that, when administered in one or more doses to an individual in need thereof (an individual having a tumor), reduces the tumor mass in the individual by at least 10%, at least 15%, at least 20%, at least 25%, at least 30%, at least 40%, at least 50%, at least 60%, at least 70%, at least 80%, at least 90%, or at least 95%, compared to the tumor mass in the individual before administration of the TMMP, or in the absence of administration with the TMMP. In some cases, an “effective amount” of a TMMP of the present disclosure is an amount that, when administered in one or more doses to an individual in need thereof (an individual having a tumor), reduces the tumor volume in the individual. For example, in some cases, an “effective amount” of a TMMP of the present disclosure is an amount that, when administered in one or more doses to an individual in need thereof (an individual having a tumor), reduces the tumor volume in the individual by at least 10%, at least 15%, at least 20%, at least 25%, at least 30%, at least 40%, at least 50%, at least 60%, at least 70%, at least 80%, at least 90%, or at least 95%, compared to the tumor volume in the individual before administration of the TMMP, or in the absence of administration with the TMMP. In some cases, an “effective amount” of a TMMP of the present disclosure is an amount that, when administered in one or more doses to an individual in need thereof, increases survival time of the individual. For example, in some cases, an “effective amount” of a TMMP of the present disclosure is an amount that, when administered in one or more doses to an individual in need thereof, increases survival time of the individual by at least 1 month, at least 2 months, at least 3 months, from 3 months to 6 months, from 6 months to 1 year, from 1 year to 2 years, from 2 years to 5 years, from 5 years to 10 years, or more than 10 years, compared to the expected survival time of the individual in the absence of administration with the TMMP.

[0421] In some instances, the epitope-specific T cell is a T cell that is specific for an epitope present on a virus-infected cell, and contacting the epitope-specific T cell with the TMMP increases cytotoxic activity of the T cell toward the virus-infected cell. In some instances, the epitope-specific T cell is a T cell that is specific for an epitope present on a virus-infected cell, and contacting the epitope-specific T cell with the TMMP increases the number of the epitope-specific T cells.

[0422] Thus, the present disclosure provides a method of treating a virus infection in an individual, the method comprising administering to the individual an effective amount of a TMMP of the present disclosure, or one or more nucleic acids comprising nucleotide sequences encoding the TMMP, where the TMMP comprises a T-cell epitope that is a viral epitope, and where the TMMP comprises a stimulatory immunomodulatory polypeptide. In some cases, an “effective amount” of a TMMP is an amount that, when administered in one or more doses to an individual in need thereof, reduces the number of virus-infected cells in the individual. For example, in some cases, an “effective amount” of a TMMP of the present disclosure is an amount that, when administered in one or more doses to an individual in need thereof, reduces the number of virus-infected cells in the individual by at least 10%, at least 15%, at least 20%, at least 25%, at least 30%, at least 40%, at least 50%, at least 60%, at least 70%, at least 80%, at least 90%, or at least 95%, compared to the number of virus-infected cells in the individual before administration of the TMMP, or in the absence of administration with the TMMP. In some cases, an “effective amount” of a TMMP of the present disclosure is an amount that, when administered in one or more doses to an individual in need thereof, reduces the number of virus-infected cells in the individual to undetectable levels.

[0423] Thus, the present disclosure provides a method of treating an infection in an individual, the method comprising administering to the individual an effective amount of a TMMP of the present disclosure, or one or more nucleic acids comprising nucleotide sequences encoding the TMMP, where the TMMP comprises a T-cell epitope that is a pathogen-associated epitope, and where the TMMP comprises a stimulatory immunomodulatory polypeptide. In some cases, an “effective amount” of a TMMP of the present disclosure is an amount that, when administered in one or more doses to an individual in need thereof, reduces the number of pathogens in the individual. For example, in some cases, an “effective amount” of a TMMP of the present disclosure is an amount that, when administered in one or more closes to an individual in need thereof, reduces the number of pathogens in the individual by at least 10%, at least 15%, at least 20%, at least 25%, at least 30%, at least 40%, at least 50%, at least 60%, at least 70%, at least 80%, at least 90%, or at least 95%, compared to the number of pathogens in the individual before administration of the TMMP, or in the absence of administration with the TMMP. In some cases, an “effective amount” of a TMMP of the present disclosure is an amount that, when administered in one or more doses to an individual in need thereof, reduces the number of pathogens in the individual to undetectable levels. Pathogens include viruses, bacteria, protozoans, and the like.

[0424] In some cases, the immunomodulatory polypeptide is an inhibitory polypeptide, and the TMMP inhibits activity of the epitope-specific T cell. In some cases, the epitope is a self-epitope, and the TMMP selectively inhibits the activity of a T cell specific for the self-epitope.

[0425] The present disclosure provides a method of treating an autoimmune disorder in an individual, the method comprising administering to the individual an effective amount of a TMMP of the present disclosure, or one or more nucleic acids comprising nucleotide sequences encoding the TMMP, where the TMMP comprises a T-cell epitope that is a self epitope, and where the TMMP comprises an inhibitory immunomodulatory polypeptide. In some cases, an “effective amount” of a TMMP of the present disclosure is an amount that, when administered in one or more doses to an individual in need thereof, reduces the number self-reactive T cells by at least 10%, at least 15%, at least 20%, at least 25%, at least 30%, at least 40%, at least 50%, at least 60%, at least 70%, at least 80%, at least 90%, or at least 95%, compared to number of self-reactive T cells in the individual before administration of the TMMP, or in the absence of administration with the TMMP. In some cases, an “effective amount” of a TMMP is an amount that, when administered in one or more doses to an individual in need thereof, reduces production of Th2 cytokines in the individual. In some cases, an “effective amount” of a TMMP of the present disclosure is an amount that, when administered in one or more doses to an individual in need thereof, ameliorates one or more symptoms associated with an autoimmune disease in the individual.

[0426] As noted above, in some cases, in carrying out a subject treatment method, a TMMP of the present disclosure is administered to an individual in need thereof, as the TMMP per se. In other instances, in carrying out a subject treatment method, one or more nucleic acids comprising nucleotide sequences encoding a TMMP of the present disclosure is/are administering to an individual in need thereof. Thus, in other instances, one or more nucleic acids of the present disclosure, e.g., one or more recombinant expression vectors of the present disclosure, is/arc administered to an individual in need thereof.

### Formulations

[0427] Suitable formulations are described above, where suitable formulations include a pharmaceutically acceptable excipient. In some cases, a suitable formulation comprises: a) a TMMP of the present disclosure; and b) a pharmaceutically acceptable excipient. In some cases, a suitable formulation comprises: a) a nucleic acid comprising a nucleotide sequence encoding a TMMP of the present disclosure; and b) a pharmaceutically acceptable excipient; in some instances, the nucleic acid is an mRNA. In some cases, a suitable formulation comprises: a) a first nucleic acid comprising a nucleotide sequence encoding the first polypeptide of a TMMP of the present disclosure; b) a second nucleic acid comprising a nucleotide sequence encoding the second polypeptide of a TMMP of the present disclosure; and c) a pharmaceutically acceptable excipient. In some cases, a suitable formulation comprises: a) a recombinant expression vector comprising a nucleotide sequence encoding a TMMP of the present disclosure; and b) a pharmaceutically acceptable excipient. In some cases, a suitable formulation comprises: a) a first recombinant expression vector comprising a nucleotide sequence encoding the first polypeptide of a TMMP of the present disclosure; b) a second recombinant expression vector comprising a nucleotide sequence encoding the second polypeptide of a TMMP of the present disclosure; and c) a pharmaceutically acceptable excipient.

[0428] Suitable pharmaceutically acceptable excipients are described above.

### Dosages

[0429] A suitable dosage can be determined by an attending physician or other qualified medical personnel, based on various clinical factors. As is well known in the medical arts, dosages for any one patient depend upon many factors, including the patient's size, body surface area, age, the particular polypeptide or nucleic acid to be administered, sex of the patient, time, and route of administration, general health, and other drugs being administered concurrently. A TMMP of the present disclosure may be administered in amounts between 1 ng/kg body weight and 20 mg/kg body weight per dose, e.g. between 0.1 mg/kg body weight to 10 mg/kg body weight, e.g. between 0.5 mg/kg body weight to 5 mg/kg body weight; however, doses below or above this exemplary range are envisioned, especially considering the aforementioned factors. If the regimen is a continuous infusion, it can also be in the range of 1 μg to 10 mg per kilogram of body weight per minute. A TMMP of the present disclosure can be administered in an amount of from about 1 mg/kg body weight to 50 mg/kg body weight, e.g., from about 1 mg/kg body weight to about 5 mg/kg body weight, from about 5 mg/kg body weight to about 10 mg/kg body weight, from about 10 mg/kg body weight to about 15 mg/kg body weight, from about 15 mg/kg body weight to about 20 mg/kg body weight, from about 20 mg/kg body weight to about 25 mg/kg body weight, from about 25 mg/kg body weight to about 30 mg/kg body weight, from about 30 mg/kg body weight to about 35 mg/kg body weight, from about 35 mg/kg body weight to about 40 mg/kg body weight, or from about 40 mg/kg body weight to about 50 mg/kg body weight.

[0430] In some cases, a suitable dose of a TMMP of the present disclosure is from 0.01 μg to 100 g per kg of body weight, from 0.1 μg to 10 g per kg of body weight, from 1 μg to 1 g per kg of body weight, from 10 μg to 100 mg per kg of body weight, from 100 μg to 10 mg per kg of body weight, or from 100 μg to 1 mg per kg of body weight. Persons of ordinary skill in the art can easily estimate repetition rates for dosing based on measured residence times and concentrations of the administered agent in bodily fluids or tissues. Following successful treatment, it may be desirable to have the patient undergo maintenance therapy to prevent the recurrence of the disease state, wherein a TMMP of the present disclosure is administered in maintenance doses, ranging from 0.01 μg to 100 g per kg of body weight, from 0.1 μg to 10 g per kg of body weight, from 1 μg to 1 g per kg of body weight, from 10 μg to 100 mg per kg of body weight, from 100 μg to 10 mg per kg of body weight, or from 100 μg to 1 mg per kg of body weight.

[0431] Those of skill will readily appreciate that dose levels can vary as a function of the specific TMMP, the severity of the symptoms and the susceptibility of the subject to side effects. Preferred dosages for a given compound are readily determinable by those of skill in the art by a variety of means.

[0432] In some cases, multiple doses of a TMMP of the present disclosure, a nucleic acid of the present disclosure, or a recombinant expression vector of the present disclosure are administered. The frequency of administration of a TMMP of the present disclosure, a nucleic acid of the present disclosure, or a recombinant expression vector of the present disclosure can vary depending on any of a variety of factors, e.g., severity of the symptoms, etc. For example, in some cases, a TMMP of the present disclosure, a nucleic acid of the present disclosure, or a recombinant expression vector of the present disclosure is administered once per month, twice per month, three times per month, every other week (qow), once per week (qw), twice per week (biw), three times per week (tiw), four times per week, five times per week, six times per week, every other day (qod), daily (qd), twice a day (qid), or three times a day (tid).

[0433] The duration of administration of a TMMP of the present disclosure, a nucleic acid of the present disclosure, or a recombinant expression vector of the present disclosure, e.g., the period of time over which a TMMP of the present disclosure, a nucleic acid of the present disclosure, or a recombinant expression vector of the present disclosure is administered, can vary, depending on any of a variety of factors, e.g., patient response, etc. For example, a TMMP of the present disclosure, a nucleic acid of the present disclosure, or a recombinant expression vector of the present disclosure can be administered over a period of time ranging from about one day to about one week, from about two weeks to about four weeks, from about one month to about two months, from about two months to about four months, from about four months to about six months, from about six months to about eight months, from about eight months to about 1 year, from about 1 year to about 2 years, or from about 2 years to about 4 years, or more.

### Routes of Administration

[0434] An active agent (a TMMP of the present disclosure, a nucleic acid of the present disclosure, or a recombinant expression vector of the present disclosure) is administered to an individual using any available method and route suitable for drug delivery, including in vivo and ex vivo methods, as well as systemic and localized routes of administration.

[0435] Conventional and pharmaceutically acceptable routes of administration include intratumoral, peritumoral, intramuscular, intralymphatic, intratracheal, intracranial, subcutaneous, intradermal, topical application, intravenous, intraarterial, rectal, nasal, oral, and other enteral and parenteral routes of administration. Routes of administration may be combined, if desired, or adjusted depending upon the TMMP and/or the desired effect. A TMMP of the present disclosure, or a nucleic acid or recombinant expression vector of the present disclosure, can be administered in a single dose or in multiple doses.

[0436] In some cases, a TMMP of the present disclosure, a nucleic acid of the present disclosure, or a recombinant expression vector of the present disclosure is administered intravenously. In some cases, a TMMP of the present disclosure, a nucleic acid of the present disclosure, or a recombinant expression vector of the present disclosure is administered intramuscularly. In some cases, a TMMP of the present disclosure, a nucleic acid of the present disclosure, or a recombinant expression vector of the present disclosure is administered intralymphatically. In some cases, a TMMP of the present disclosure, a nucleic acid of the present disclosure, or a recombinant expression vector of the present disclosure is administered locally. In some cases, a TMMP of the present disclosure, a nucleic acid of the present disclosure, or a recombinant expression vector of the present disclosure is administered intratumorally. In some cases, a TMMP of the present disclosure, a nucleic acid of the present disclosure, or a recombinant expression vector of the present disclosure is administered peritumorally. In some cases, a TMMP of the present disclosure, a nucleic acid of the present disclosure, or a recombinant expression vector of the present disclosure is administered intracranially. In some cases, a TMMP of the present disclosure, a nucleic acid of the present disclosure, or a recombinant expression vector of the present disclosure is administered subcutaneously.

[0437] In some cases, a TMMP of the present disclosure is administered intravenously. In some cases, a TMMP of the present disclosure is administered intramuscularly. In some cases, a TMMP of the present disclosure is administered locally. In some cases, a TMMP the present disclosure is administered intratumorally. In some cases, a TMMP of the present disclosure is administered peritumorally. In some cases, a TMMP of the present disclosure is administered intracranially. In some cases, a TMMP is administered subcutaneously. In some cases, a TMMP of the present disclosure is administered intralymphatically.

[0438] A TMMP of the present disclosure, a nucleic acid of the present disclosure, or a recombinant expression vector of the present disclosure can be administered to a host using any available conventional methods and routes suitable for delivery of conventional drugs, including systemic or localized routes. In general, routes of administration contemplated for use in a method of the present disclosure include, but are not necessarily limited to, enteral, parenteral, and inhalational routes.

[0439] Parenteral routes of administration other than inhalation administration include, but are not necessarily limited to, topical, transdermal, subcutaneous, intramuscular, intraorbital, intracapsular, intraspinal, intrasternal, intratumoral, intralymphatic, peritumoral, and intravenous routes, i.e., any route of administration other than through the alimentary canal. Parenteral administration can be carried to effect systemic or local delivery of a TMMP of the present disclosure, a nucleic acid of the present disclosure, or a recombinant expression vector of the present disclosure. Where systemic delivery is desired, administration typically involves invasive or systemically absorbed topical or mucosal administration of pharmaceutical preparations.

### Combination Therapies

[0440] In some cases, a method of the present disclosure for treating cancer in an individual comprises: a) administering a TMMP of the present disclosure; and b) administering at least one additional therapeutic agent or therapeutic treatment. Suitable additional therapeutic agents include, but are not limited to, a small molecule cancer chemotherapeutic agent, and an immune checkpoint inhibitor. Suitable additional therapeutic treatments include, e.g., radiation, surgery (e.g., surgical resection of a tumor), and the like.

[0441] A treatment method of the present disclosure can comprise co-administration of a TMMP of the present disclosure and at least one additional therapeutic agent. By “co-administration” is meant that both a TMMP of the present disclosure and at least one additional therapeutic agent are administered to an individual, although not necessarily at the same time, in order to achieve a therapeutic effect that is the result of having administered both the TMMP and the at least one additional therapeutic agent. The administration of the TMMP and the at least one additional therapeutic agent can be substantially simultaneous, e.g., the TMMP can be administered to an individual within about 1 minute to about 24 hours (e.g., within about 1 minute, within about 5 minutes, within about 15 minutes, within about 30 minutes, within about 1 hour, within about 4 hours, within about 8 hours, within about 12 hours, or within about 24 hours) of administration of the at least one additional therapeutic agent. In some cases, a TMMP of the present disclosure is administered to an individual who is undergoing treatment with, or who has undergone treatment with, the at least one additional therapeutic agent. The administration of the TMMP can occur at different times and/or at different frequencies.

[0442] As an example, a treatment method of the present disclosure can comprise co-administration of a TMMP of the present disclosure and an immune checkpoint inhibitor such as an antibody specific for an immune checkpoint. By “co-administration” is meant that both a TMMP of the present disclosure and an immune checkpoint inhibitor (e.g., an antibody specific for an immune checkpoint polypeptide) are administered to an individual, although not necessarily at the same time, in order to achieve a therapeutic effect that is the result of having administered both the TMMP and the immune checkpoint inhibitor (e.g., an antibody specific for an immune checkpoint polypeptide). The administration of the TMMP and the immune checkpoint inhibitor (e.g., an antibody specific for an immune checkpoint polypeptide) can be substantially simultaneous, e.g., the TMMP can be administered to an individual within about 1 minute to about 24 hours (e.g., within about 1 minute, within about 5 minutes, within about 15 minutes, within about 30 minutes, within about 1 hour, within about 4 hours, within about 8 hours, within about 12 hours, or within about 24 hours) of administration of the immune checkpoint inhibitor (e.g., an antibody specific for an immune checkpoint polypeptide). In some cases, a TMMP of the present disclosure is administered to an individual who is undergoing treatment with, or who has undergone treatment with, an immune checkpoint inhibitor (e.g., an antibody specific for an immune checkpoint polypeptide). The administration of the TMMP and the immune checkpoint inhibitor (e.g., an antibody specific for an immune checkpoint polypeptide) can occur at different times and/or at different frequencies.

[0443] Exemplary immune checkpoint inhibitors include inhibitors that target an immune checkpoint polypeptide such as CD27, CD28, CD40, CD122, CD96, CD73, CD47, OX40, GITR, CSF1R, JAK, PI3K delta, PI3K gamma, TAM, arginase, CD137 (also known as 4-1BB), ICOS, A2AR, B7-H3, B7-H4, BTLA, CTLA-4, LAG3, TIM3, VISTA, CD96, TIGIT, CD122, PD-1, PD-L1 and PD-L2. In some cases, the immune checkpoint polypeptide is a stimulatory checkpoint molecule selected from CD27, CD28, CD40, ICOS, OX40, GITR, CD122 and CD137. In some cases, the immune checkpoint polypeptide is an inhibitory checkpoint molecule selected from A2AR, B7-H3, B7-H4, BTLA, CTLA-4, IDO, KIR, LAG3, PD-1, TIM3, CD96, TIGIT and VISTA.

[0444] In some cases, the immune checkpoint inhibitor is an antibody specific for an immune checkpoint polypeptide. In some cases, the anti-immune checkpoint antibody is a monoclonal antibody. In some cases, the anti-immune checkpoint antibody is humanized, or de-immunized such that the antibody does not substantially elicit an immune response in a human. In some cases, the anti-immune checkpoint antibody is a humanized monoclonal antibody. In some cases, the anti-immune checkpoint antibody is a de-immunized monoclonal antibody. In some cases, the anti-immune checkpoint antibody is a fully human monoclonal antibody. In some cases, the anti-immune checkpoint antibody inhibits binding of the immune checkpoint polypeptide to a ligand for the immune checkpoint polypeptide. In some cases, the anti-immune checkpoint antibody inhibits binding of the immune checkpoint polypeptide to a receptor for the immune checkpoint polypeptide.

[0445] Suitable anti-immune checkpoint antibodies include, but are not limited to, nivolumab (Bristol-Myers Squibb), pembrolizumab (Merck), pidilizumab (Curetech), AMP-224 (GlaxoSmithKline/Amplimmune), MPDL3280A (Roche), MDX-1105 (Medarex, Inc./Bristol Myer Squibb), MEDI-4736 (Medimmune/AstraZeneca), arelumab (Merck Serono), ipilimumab (YERVOY, (Bristol-Myers Squibb), tremelimumab (Pfizer), pidilizumab (CureTech, Ltd.), IMP321 (Immutep S.A.), MGA271 (Macrogenics), BMS-986016 (Bristol-Meyers Squibb), lirilumab (Bristol-Myers Squibb), urelumab (Bristol-Meyers Squibb), PF-05082566 (Pfizer), IPH2101 (Innate Pharma/Bristol-Myers Squibb), MEDI-6469 (MedImmune/AZ), CP-870,893 (Genentech), Mogamulizumab (Kyowa Hakko Kirin), Varlilumab (CellDex Therapeutics), Avelumab (EMD Serono), Galiximab (Biogen Idec), AMP-514 (Amplimmune/AZ), AUNP 12 (Aurigene and Pierre Fabre), Indoximod (NewLink Genetics), NLG-919 (NewLink Genetics), INCB024360 (Incyte); KN035; and combinations thereof. For example, in some cases, the immune checkpoint inhibitor is an anti-PD-1 antibody. Suitable anti-PD-1 antibodies include, e.g., nivolumab, pembrolizumab (also known as MK-3475), pidilizumab, SHR-1210, PDR001, and AMP-224. In some cases, the anti-PD-1 monoclonal antibody is nivolumab, pembrolizumab or PDR001. Suitable anti-PD1 antibodies are described in U.S. Patent Publication No. 2017/0044259. For pidilizumab, see, e.g., Rosenblatt et al. (2011) J. Immunother. 34:409-18. In some cases, the immune checkpoint inhibitor is an anti-CTLA-4 antibody. In some cases, the anti-CTLA-4 antibody is ipilimuniab or tremelimumab. For tremelimumab, see, e.g., Ribas et al. (2013) J. Clin. Oncol. 31:616-22. In some cases, the immune checkpoint inhibitor is an anti-PD-L1 antibody. In some cases, the anti-PD-L1 monoclonal antibody is BMS-935559, MEDI4736, MPDL3280A (also known as RG7446), KN035, or MSB0010718C. In some embodiments, the anti-PD-L1 monoclonal antibody is MPDL3280A (atezolizumab) or MEDI4736 (durvalumab). For durvalumab, see, e.g., WO 2011/066389. For atezolizumab, see, e.g., U.S. Pat. No. 8,217,149.

### Subjects Suitable for Treatment

[0446] Subjects suitable for treatment with a method of the present disclosure include individuals who have cancer, including individuals who have been diagnosed as having cancer, individuals who have been treated for cancer but who failed to respond to the treatment, and individuals who have been treated for cancer and who initially responded but subsequently became refractory to the treatment. Subjects suitable for treatment with a method of the present disclosure include individuals who have an infection (e.g., an infection with a pathogen such as a bacterium, a virus, a protozoan, etc.), including individuals who have been diagnosed as having an infection, and individuals who have been treated for an infection but who failed to respond to the treatment. Subjects suitable for treatment with a method of the present disclosure include individuals who have bacterial infection, including individuals who have been diagnosed as having a bacterial infection, and individuals who have been treated for a bacterial infection but who failed to respond to the treatment. Subjects suitable for treatment with a method of the present disclosure include individuals who have a viral infection, including individuals who have been diagnosed as having a viral infection, and individuals who have been treated for a viral infection but who failed to respond to the treatment. Subjects suitable for treatment with a method of the present disclosure include individuals who have an autoimmune disease, including individuals who have been diagnosed as having an autoimmune disease, and individuals who have been treated for an autoimmune disease but who failed to respond to the treatment.

### Examples of Non-Limiting Aspects of the Disclosure

### Aspects Set A

[0447] Aspects, including embodiments, of the present subject matter described above may be beneficial alone or in combination, with one or more other aspects or embodiments. Without limiting the foregoing description, certain non-limiting aspects of the disclosure numbered 1-94 are provided below. As will be apparent to those of skill in the art upon reading this disclosure, each of the individually numbered aspects may be used or combined with any of the preceding or following individually numbered aspects. This is intended to provide support for all such combinations of aspects and is not limited to combinations of aspects explicitly provided below:

[0448] Aspect 1. T-cell modulatory multimeric polypeptide comprising: a least one heterodimer comprising: a) a first polypeptide comprising: i) an alpha-feto protein (AFP) peptide epitope; and ii) first major histocompatibility complex (MHC) polypeptide; b) a second polypeptide comprising a second MHC polypeptide, and c) at least one immunomodulatory polypeptide, wherein the first and/or the second polypeptide comprises the immunomodulatory polypeptide.

[0449] Aspect 2. A T-cell modulatory multimeric polypeptide of aspect 1, wherein at least one of the one or more immunomodulatory domains is a variant immunomodulatory polypeptide that exhibits reduced affinity to a cognate co-immunomodulatory polypeptide compared to the affinity of a corresponding wild-type immunomodulatory polypeptide for the cognate co-immunomodulatory polypeptide, and wherein the epitope binds to a T-cell receptor (TCR) on a T cell with an affinity of at least 10⁻⁷ M, such that: i) the T-cell modulatory multimeric polypeptide binds to a first T cell with an affinity that is at least 25% higher than the affinity with which the T-cell modulatory multimeric polypeptide binds a second T cell, wherein the first T cell expresses on its surface the cognate co-immunomodulatory polypeptide and a TCR that binds the epitope with an affinity of at least 10⁻⁷ M, and wherein the second T cell expresses on its surface the cognate co-immunomodulatory polypeptide hut does not express on its surface a TCR that binds the epitope with an affinity of at least 10⁻⁷ M; and/or ii) the ratio of the binding affinity of a control T-cell modulatory multimeric polypeptide, wherein the control comprises a wild-type immunomodulatory polypeptide, to a cognate co-immunomodulatory polypeptide to the binding affinity of the T-cell modulatory multimeric polypeptide comprising a variant of the wild-type immunomodulatory polypeptide to the cognate co-immunomodulatory polypeptide, when measured by bio-layer interferometry, is in a range of from 1.5:1 to 10⁶:1.

[0450] Aspect 3. A T-cell modulatory multimeric polypeptide of aspect 2, wherein: a) the T-cell modulatory multimeric polypeptide binds to the first T cell with an affinity that is at least 50%, at least 2-fold, at least 5-fold, or at feast 10-fold higher than the affinity with which it binds the second T cell; and/or b) the variant immunomodulatory polypeptide binds the co-immunomodulatory polypeptide with an affinity of from about 10⁻⁴ M to about 10⁻⁷M, from about 10⁻⁴ M to about 10⁻⁶ M, from about 10⁻⁴ M to about 10⁻⁵ M; and/or c) wherein the ratio of the binding affinity of a control T-cell modulatory multimeric polypeptide, wherein the control comprises a wild-type immunomodulatory polypeptide, to a cognate co-immunomodulatory polypeptide to the binding affinity of the T-cell modulatory multimeric polypeptide comprising a variant of the wild-type immunomodulatory polypeptide to the cognate co-immunomodulatory polypeptide, when measured by bio-layer interferometry, is at least 10:1, at least 50:1, at least 10²:1, or at least 10³:1.

[0451] Aspect 4. A T-cell modulatory multimeric polypeptide of any one of aspects 1-3, wherein the first or the second polypeptide comprises an immunoglobulin (Ig) Fc polypeptide.

[0452] Aspect 5. A T-cell modulatory multimeric polypeptide of aspect 4, wherein the Ig Fc polypeptide is an IgG1 Fc polypeptide.

[0453] Aspect 6. A T-cell modulatory multimeric polypeptide of aspect 5, wherein IgG1 Fc polypeptide comprises one or more amino acid substitutions selected from N297A, L234A, L235A, L234F, L235E, and P331S.

[0454] Aspect 7. A T-cell modulatory multimeric polypeptide of any one of aspects 1-6, wherein: a1) the first polypeptide comprises, in order from N-terminus to C-terminus: i) the AFP peptide epitope; ii) the first MHC polypeptide; and iii) at least one immunomodulatory polypeptide; and b1) the second polypeptide comprises, in order from N-terminus to C-terminus: i) the second MHC polypeptide; and ii) an immunoglobulin (Ig) Fc polypeptide; or a2) the first polypeptide comprises, in order from N-terminus to C-terminus: i) the AFP peptide epitope; and ii) the first MHC polypeptide; and b2) the second polypeptide comprises, in order from N-terminus to C-terminus: i) at least one immunomodulatory polypeptide; ii) the second MHC polypeptide; and iii) an Ig Fc polypeptide; or a3) the first polypeptide comprises, in order from N-terminus to C-terminus: i) the AFP peptide epitope; and ii) the first MHC polypeptide; and b3) the second polypeptide comprises, in order from N-terminus to C-terminus: i) the second MHC polypeptide; and ii) an Ig Fc polypeptide; and iii) at least one immunomodulatory polypeptide; or a4) the first polypeptide comprises, in order from N-terminus to C-terminus: i) the AFP peptide epitope; and ii) the first MHC polypeptide; and b4) the second polypeptide comprises, in order from N-terminus to C-terminus: i) the second MHC polypeptide; and ii) at least one immunomodulatory polypeptide; or a5) the first polypeptide comprises, in order from N-terminus to C-terminus: i) the AFP peptide epitope; and ii) the first MHC polypeptide; and b5) a second polypeptide comprises, in order from N-terminus to C-terminus: i) at least one immunomodulatory polypeptide; and ii) the second MHC polypeptide; or a6) the first polypeptide comprises, in order from N-terminus to C-terminus: i) the AFP peptide epitope; ii) the first MHC polypeptide; and iii) at least one immunomodulatory polypeptide; and b6) the second polypeptide comprises: i) the second MHC polypeptide.

[0455] Aspect 8. A T-cell modulatory multimeric polypeptide of any one of aspects 1-7, wherein the first polypeptide comprises a peptide linker between the AFP epitope and the first MHC polypeptide and/or wherein the second polypeptide comprises a peptide linker between the immunomodulatory polypeptide and the second MHC polypeptide.

[0456] Aspect 9. A T-cell modulatory multimeric polypeptide of aspect 8, wherein the peptide linker comprises the amino acid sequence (GGGGS)n (SEQ ID NO: 284), where n is an integer from 1 to 10.

[0457] Aspect 10. A T-cell modulatory multimeric polypeptide of any one of aspects 1-9, wherein the first MHC polypeptide is a β2-microglobulin polypeptide; and wherein the second MHC polypeptide is an MHC class I heavy chain polypeptide.

[0458] Aspect 11. A T-cell modulatory multimeric polypeptide of any one of aspects 1-10, wherein the at least one immunomodulatory polypeptide is selected from the group consisting of a cytokine (e.g., an IL2 polypeptide, an IL7 polypeptide, an IL12 polypeptide, an IL15 polypeptide, an IL17 polypeptide, an IL21 polypeptide, an IL27 polypeptide, an IL-23 polypeptide, a TGFβ polypeptide, and the like; and including all family members, e.g., IL17A, IL-17B, IL-17C, IL-17D, IL-17E, IL-17F, IL-17E), a 4-1BBL polypeptide, an ICOS-L polypeptide, an OX-40L polypeptide, a CD80 polypeptide, a CD86 polypeptide, a CD40 polypeptide, a CD70 polypeptide, a JAG1 (CD339) polypeptide, an ICAM (CD540 polypeptide, a PD-L1 polypeptide, a FasL polypeptide, a PD-L2 polypeptide, a PD-1H (VISTA) polypeptide, an ICOS-L (CD275) polypeptide, a GITRL polypeptide, an HVEM polypeptide, a CXCL10 polypeptide, a CXCL9 polypeptide, a CXCL11 polypeptide, a CXCL13 polypeptide, and a CX3CL1 polypeptide, a Galectin-9 polypeptide, a CD83 polypeptide, a CD30L polypeptide, a HLA-G polypeptide, a MICA polypeptide, a MICB polypeptide, a HVEM (CD270) polypeptide, a lymphotoxin beta receptor polypeptide, a 3/TR6 polypeptide, an ILT3 polypeptide, an ILT4 polypeptide, a CXCL10 polypeptide, a CXCL9 polypeptide, a CXCL11 polypeptide, a CXCL13 polypeptide, and a CX3CL1 polypeptide, and combinations thereof.

[0459] Aspect 12. A T-cell modulatory multimeric polypeptide of any one of aspects 1-11, wherein the at least one immunomodulatory polypeptide is an IL-2 polypeptide.

[0460] Aspect 13. A T-cell modulatory multimeric polypeptide of any one of aspects 1-12, wherein the multimeric polypeptide comprises at least two immunomodulatory polypeptides, and wherein at least two of the immunomodulatory polypeptides are the same.

[0461] Aspect 14. A T-cell modulatory multimeric polypeptide of aspect 13, wherein the 2 or more immunomodulatory polypeptides are in tandem.

[0462] Aspect 15. A T-cell modulatory multimeric polypeptide of any one of aspects 1-14, wherein the first polypeptide and the second polypeptide are covalently linked to one another.

[0463] Aspect 16. A T-cell modulatory multimeric polypeptide of aspect 15, wherein the covalent linkage is via a disulfide bond.

[0464] Aspect 17. A T-cell modulatory multimeric polypeptide of any one of aspects 1-16, wherein the first MHC polypeptide or a linker between the epitope and the first MHC polypeptide comprises an amino acid substitution to provide a first Cys residue, wherein the second MHC polypeptide comprises an amino acid substitution to provide a second Cys residue, and wherein the disulfide linkage is between the first and the second Cys residues.

[0465] Aspect 18. A T-cell modulatory multimeric polypeptide of any one of aspects 1-17, wherein the AFP peptide epitope has a length of from about 4 amino acids to about 25 amino acids.

[0466] Aspect 19. A T-cell modulatory multimeric polypeptide of any one of aspects 1-18, wherein the AFP peptide epitope comprises an amino acid sequence selected from the group consisting of:

AITRKMAAT (SEQ ID NO:479); AYTKKAPQL (SEQ ID NO:480); LLNQHACAV (SEQ ID
NO:481); KLVLDVAHV (SEQ ID NO:482); FMNKFIYEI (SEQ ID NO:483); SIPLFQVPE (SEQ ID
NO:484); LLNFTESRT (SEQ ID NO:485); FVQEATYKF (SEQ ID NO:486); ATYKEVSKM (SEQ ID
NO:487); KEVSKMVKD (SEQ ID NO:488); RHNCFLAHK (SEQ ID NO:489); ATAATCCQL (SEQ
ID NO:490); YIQESQALA (SEQ ID NO:491); QLTSSELMAI (SEQ ID NO:492); KLSQKFTKV (SEQ
ID NO:493); KELRESSLL (SEQ ID NO:494); SLVVDETYV (SEQ ID NO:495); ILLWAARYD (SEQ
ID NO:496); KIIPSCCKA (SEQ ID NO:497); CRGDVLDCL (SEQ ID NO:498); QQDTLSNKI (SEQ
ID NO:499); TMKQEFLINL (SEQ ID NO:500); NLVKQKPQI (SEQ ID NO:501); AVIADFSGL (SEQ
ID NO:502); LLACGEGAA (SEQ ID NO:503); LACGEGAAD (SEQ ID NO:504); KAPQLTSSEL
(SEQ ID NO:505); YICSQQDTL (SEQ ID NO:506); TECCKLTTL (SEQ ID NO:507); CTAEISLADL
(SEQ ID NO:508); VTKELRESSL (SEQ ID NO:509); IMSYICSQQD (SEQ ID NO:510); TRTFQAITV
(SEQ ID NO:511); FQKLGEYYL (SEQ ID NO:512); RVAKGYQEL (SEQ ID NO:513);
SYQCTAEISL (SEQ ID NO:514); KQEFLINLV (SEQ ID NO:515); MKWVESIFL (SEQ ID NO:516);
PVNPGVGQC (SEQ ID NO:517); AADIIIGHL (SEQ ID NO:518); QVPEPVTSC (SEQ ID NO:519);
TTLERGQCII (SEQ ID NO:520); KMAATAATC (SEQ ID NO:521); QAQGVALQTM (SEQ ID
NO:522); FQAITVTKL (SEQ ID NO:523); LLEKCFQTE (SEQ ID NO:524); VAYTKKAPQ (SEQ
NO:525); KYIQESQAL (SEQ ID NO:526); GVALQTMKQ (SEQ ID NO:527); GQEQEVCFA (SEQ
ID NO:528); SEEGRHNCFL (SEQ ID NO:529); RHPFLYAPTI (SEQ ID NO:530); TEIQKLVLDV
(SEQ ID NO:531); RRHPQLAVSV (SEQ ID NO:532); GEYYLQNAFL (SEQ ID NO:533);
NRRPCFSSLV (SEQ ID NO:534); LQTMKQEFLI (SEQ ID NO:535); IADFSGLLEK (SEQ ID
NO:536); GLLEKCCQGQ (SEQ ID NO:537); TLSNKITEC (SEQ ID NO:538); LQDGEKIMSY (SEQ
ID NO:539); GLFQKLGBY (SEQ ID NO:540); NEYGIASILD (SEQ ID NO:541); KMVKDALTAI
(SEQ ID NO:542); FLASFVHEY (SEQ ID NO:543); and AQFVQEATY (SEQ ID NO:544).

[0467] Aspect 20. A T-cell modulatory multimeric polypeptide of any one of aspects 1-18, wherein the AFP peptide comprises the amino acid sequence KYIQESQAL (SEQ ID NO:526).

[0468] Aspect 21. A T-cell modulatory multimeric polypeptide of any one of aspects 1-20, wherein the first or the second MHC polypeptide comprises: a) an amino acid sequence having at least 95% amino acid sequence identity to the HLA-A*0101, HLA-A*0201, HLA-A*0201, HLA-A*1101, HLA-A*2301, HLA-A*2402, HLA-A*2407, HLA-A*3303, or HLA-A*3401 amino acid sequence depicted in FIG. 11A; or b) an amino acid sequence having at least 95% amino acid sequence identity to the HLA-B*0702, HLA-B*0801, HLA-B*1502, HLA-B*3802, HLA-B*4001, HLA-B*4601, or HLA-B*5301 amino acid sequence depicted in FIG. 12A; or c) an amino acid sequence having at least 95% amino acid sequence identity to the HLA-C*0102, HLA-C*0303, HLA-C*0304, HLA-C*0401, HLA-C*0602, HLA-C*0701, HLA-C*0702, HLA-C*0801, or HLA-C*1502 depicted in FIG. 13A.

[0469] Aspect 22. A T-cell modulatory multimeric polypeptide of any one of aspects 1-20, wherein the first. MHC polypeptide is a β2M polypeptide, and wherein the second MHC polypeptide comprises an amino acid sequence having at least 95% amino acid sequence identity to an HLA-A*2402 polypeptide.

[0470] Aspect 23. A T-cell modulatory multimeric polypeptide of any one of aspects 1-20, wherein the first MHC polypeptide is a β2M polypeptide, and wherein the second MHC polypeptide is an HLA-A*1101 polypeptide.

[0471] Aspect 24. A T-cell modulatory multimeric polypeptide of any one of aspects 1-20, wherein the first MHC polypeptide is a β2M polypeptide, and wherein the second MHC polypeptide comprises an amino acid sequence having at least 95% amino acid sequence identity to an HLA-A*3303 polypeptide.

[0472] Aspect 25. A T-cell modulatory multimeric polypeptide of any one of aspects 1-20, wherein the first MHC polypeptide is a β2M polypeptide, and wherein the second MHC polypeptide comprises an amino acid sequence having at least 95% amino acid sequence identity to an HLA-A*0201 polypeptide.

[0473] Aspect 26. A T-cell modulatory multimeric polypeptide of any one of aspects 21-25, wherein the MHC heavy chain polypeptide comprises a Cys at position 236.

[0474] Aspect 27. A T-cell modulatory multimeric polypeptide of any one of aspects 21-26, wherein the β2M polypeptide comprises a Cys at position 12.

[0475] Aspect 28. A T-cell modulatory multimeric polypeptide of any one of aspects 1-27, wherein the immunomodulatory polypeptide is a variant IL-2 polypeptide comprising: i) an H16A substitution and an F42A substation; or ii) an H16T substitution and an F42A substitution.

[0476] Aspect 29. A T-cell modulatory multimeric polypeptide of any one of aspects 4-28, wherein the multimeric polypeptide comprises a first and a second heterodimer, and wherein the first and second heterodimers are covalently bound by one or more disulfide bonds between the Ig Fc polypeptides of the first and second heterodimers.

[0477] Aspect 30. A nucleic acid comprising a nucleotide sequence encoding a first or second polypeptide according to any one of aspects 1-28, wherein the first or second polypeptide comprises at least one immunomodulatory domain.

[0478] Aspect 31. An expression vector comprising the nucleic acid of aspect 30.

[0479] Aspect 32. A method of selectively modulating the activity of T cell specific for an alpha feto protein (AFP) epitope, the method comprising contacting the T cell with a T-cell modulatory multimeric polypeptide according to any one of aspects 1-29, wherein said contacting selectively modulates the activity of the AFP epitope-specific T cell.

[0480] Aspect 33. A method of treating a patient having a cancer, the method comprising administering to the patient an effective amount of a pharmaceutical composition comprising T-cell modulatory multimeric polypeptide according to any one of aspects 1-29, or the nucleic acid of aspect 30, or the expression vector of aspect 31.

[0481] Aspect 34. The method of aspect 33, wherein the cancer is hepatocellular carcinoma, pancreatic cancer, stomach cancer, colorectal cancer, hepatoblastoma, or an ovarian yolk sac tumor.

[0482] Aspect 35. The method of aspect 33 or aspect 34, wherein said administering is intramuscular.

[0483] Aspect 36. The method of aspect 33 or aspect 34, wherein said administering is intravenous.

[0484] Aspect 37. A method of modulating an immune response in an individual, the method comprising administering to the individual an effective amount of the T-cell modulatory multimeric polypeptide (TMMP) of any one of aspects 1-29, or the nucleic acid of aspect 30, or the expression vector of aspect 31, wherein said administering induces an epitope-specific T cell response (e.g., a T cell response specific for the AFP epitope present in the TMMP) and an epitope-non-specific T cell response, wherein the ratio of the epitope-specific T cell response to the epitope-non-specific T cell response is at least 2:1.

[0485] Aspect 38. The method of aspect 37, wherein the ratio of the epitope-specific T cell response to the epitope-non-specific T cell response is at least 5:1.

[0486] Aspect 39. The method of aspect 37, wherein the ratio of the epitope-specific T cell response to the epitope-non-specific T cell response is at least 10:1.

[0487] Aspect 40. The method of aspect 37, wherein the ratio of the epitope-specific T cell response to the epitope-non-specific T cell response is at least 25:1.

[0488] Aspect 41. The method of aspect 37, wherein the ratio of the epitope-specific T cell response to the epitope-non-specific T cell response is at least 50:1.

[0489] Aspect 42. The method of aspect 37, wherein the ratio of the epitope-specific T cell response to the epitope-non-specific T cell response is at least 100:1.

[0490] Aspect 43. The method of any one of aspects 35-40, wherein the individual is a human.

[0491] Aspect 44. The method of any one of aspects 37-43, wherein said modulating comprises increasing a cytotoxic T-cell response to a cancer cell (e.g., an AFP-expressing cancer cell).

[0492] Aspect 45. The method of any one of aspects 37-44, wherein said administering is intravenous, subcutaneous, intramuscular, systemic, intralymphatic, distal to a treatment site, local, or at or near a treatment site.

[0493] Aspect 46. The method of any one of aspects 37-44, wherein the epitope non-specific T-cell response is less than the epitope non-specific T-cell response that would be induced by a control T-cell modulatory multimeric polypeptide comprising a corresponding wild-type immunomodulatory polypeptide.

[0494] Aspect 47. A method of delivering a costimulatory (i.e., immunomodulatory) polypeptide selectively to target T cell, the method comprising contacting a mixed population of T cells with a T-cell modulatory multimeric polypeptide (TMMP) of any one of aspects 1-29, wherein the mixed population of T cells comprises the target T cell and non-target T cells, wherein the target T cell is specific for the epitope present within the TMMP (e.g., wherein the target T cell is specific for the AFP epitope present within the TMMP), and wherein said contacting delivers the one or more costimulatory polypeptides present within the TMMP to the target T cell.

[0495] Aspect 48. The method of aspect 47, wherein the population of T cells is in vitro.

[0496] Aspect 49. The method of aspect 47, wherein the population of T cells is in vivo in an individual.

[0497] Aspect 50. The method of aspect 49, comprising administering the multimeric polypeptide to the individual.

[0498] Aspect 51. The method of any one of aspects 47-50, wherein the target T cell is a cytotoxic T cell.

[0499] Aspect 52. The method of aspect 47, wherein the mixed population of T cells is an in vitro population of mixed T cells obtained from an individual, and wherein said contacting results in activation and/or proliferation of the target T cell, generating a population of activated and/or proliferated target T cells.

[0500] Aspect 53. The method of aspect 52, further comprising administering the population of activated and/or proliferated target T cells to the individual.

[0501] Aspect 54. A method of detecting, in a mixed population of T cells obtained from an individual, the presence of a target T cell that binds an AFP epitope of interest, the method comprising: a) contacting in vitro the mixed population of T cells with T-cell modulatory multimeric polypeptide (TMMP) of any one of aspects 1-29, wherein the TMMP comprises the AFP epitope of interest; and b) detecting activation and/or proliferation of T cells in response to said contacting, wherein activated and/or proliferated T cells indicates the presence of the target T cell.

[0502] Aspect 55. A T-cell modulatory multimeric polypeptide comprising: at least one heterodimer comprising: a) a first polypeptide comprising: i) an alpha-feto protein (AFP) peptide epitope, wherein the AFP peptide has a length of from about 4 amino acids to about 25 amino acids; and ii) first major histocompatibility complex (MHC) class I polypeptide; b) a second polypeptide comprising a second MHC class I polypeptide, and c) at least one immunomodulatory polypeptide, wherein the first and/or the second polypeptide comprises the immunomodulatory polypeptide, wherein the first and the second polypeptides are covalently linked to one another via at least 2 disulfide bonds.

[0503] Aspect 56. A T-cell modulatory multimeric polypeptide of aspect 55, wherein at least one of the at least one immunomodulatory polypeptides is a variant immunomodulatory polypeptide that exhibits reduced affinity to a cognate co-immunomodulatory polypeptide compared to the affinity of a corresponding wild-type immunomodulatory polypeptide for the cognate co-immunomodulatory polypeptide, and wherein the epitope binds to a T-cell receptor (TCR) on a T cell with an affinity of at least 10⁻⁷ M, such that: i) the T-cell modulatory multimeric polypeptide binds to a first T cell with an affinity that is at least 25% higher than the affinity with which the T-cell modulatory multimeric polypeptide binds a second T cell, wherein the first T cell expresses on its surface the cognate co-immunomodulatory polypeptide and a TCR that binds the epitope with an affinity of at least 10⁻⁷ M, and wherein the second T cell expresses on its surface the cognate co-immunomodulatory polypeptide but does not express on its surface a TCR that binds the epitope with an affinity of at least 10⁻⁷ M; and/or ii) the ratio of the binding affinity of a control T-cell modulatory multimeric polypeptide, wherein the control comprises a wild-type immunomodulatory polypeptide, to a cognate co-immunomodulatory polypeptide to the binding affinity of the T-cell modulatory multimeric polypeptide comprising a variant of the wild-type immunomodulatory polypeptide to the cognate co-immunomodulatory polypeptide, when measured by bio-layer interferometry, is in a range of from 1.5:1 to 10⁶:1.

[0504] Aspect 57. A T-cell modulatory multimeric polypeptide of aspect 56, wherein: a) the T-cell modulatory multimeric polypeptide binds to the first T cell with an affinity that is at least 50%, at least 2-fold, at least 5-fold, or at least 10-fold higher than the affinity with which it binds the second T cell; and/or b) the variant immunomodulatory polypeptide binds the co-immunomodulatory polypeptide with an affinity of from about 10⁻⁴ M to about 10⁻⁷ M, from about 10⁻⁴ M to about 10⁻⁶ M, from about 10⁻⁴ M to about 10⁻⁵ M; and/or c) wherein the ratio of the binding affinity of a control T-cell modulatory multimeric polypeptide, wherein the control comprises a wild-type immunomodulatory polypeptide, to a cognate co-immunomodulatory polypeptide to the binding affinity of the T-cell modulatory multimeric polypeptide comprising a variant of the wild-type immunomodulatory polypeptide to the cognate co-immunomodulatory polypeptide, when measured by bio-layer interferometry, is at least 10:1, at least 50:1, at least 10²:1, or at least 10³:1.

[0505] Aspect 58. A T-cell modulatory multimeric polypeptide of any one of aspects 55-57, wherein the first or the second polypeptide comprises an immunoglobulin (Ig) Fc polypeptide.

[0506] Aspect 59. A T-cell modulatory multimeric polypeptide of aspect 58, wherein the Ig Fc polypeptide is an IgG1 Fc polypeptide.

[0507] Aspect 60. A T-cell modulatory multimeric polypeptide of aspect 59, wherein IgG1 Fc polypeptide comprises one or more amino acid substitutions selected from N297A, L234A, L235A, L234F, L235E, and P331S.

[0508] Aspect 61. A T-cell modulatory multimeric polypeptide of any one of aspects 55-60, wherein

a1) the first polypeptide comprises, in order from N-terminus to C-terminus:
[0509] i) the AFP peptide epitope;
[0510] ii) the first class I MHC polypeptide; and
[0511] iii) at least one immunomodulatory polypeptide; and
   b1) the second polypeptide comprises, in order from N-terminus to C-terminus:
[0512] i) the second class I MHC polypeptide; and
[0513] ii) an immunoglobulin (Ig) Fc polypeptide; or
   a2) the first polypeptide comprises, in order from N-terminus to C-terminus:
[0514] i) the AFP peptide epitope; and
[0515] ii) the first class I MHC polypeptide; and
   b2) the second polypeptide comprises, in order from N-terminus to C-terminus:
[0516] i) at least one immunomodulatory polypeptide;
[0517] ii) the second class I MHC polypeptide; and
[0518] iii) an Ig Fc polypeptide; or
   a3) the first polypeptide comprises, in order from N-terminus to C-terminus:
[0519] i) the AFP peptide epitope; and
[0520] ii) the first class I MHC polypeptide; and
   b3) the second polypeptide comprises, in order from N-terminus to C-terminus:
[0521] i) the second class I MHC polypeptide; and
[0522] ii) an Ig Fc polypeptide; and
[0523] iii) at least one immunomodulatory polypeptide; or
   a4) the first polypeptide comprises, in order from N-terminus to C-terminus:
[0524] i) the AFP peptide epitope; and
[0525] ii) the first class I MHC polypeptide; and
   b4) the second polypeptide comprises, in order from N-terminus to C-terminus:
[0526] i) the second class I MHC polypeptide; and
[0527] ii) at least one immunomodulatory polypeptide; or
   a5) the first polypeptide comprises, in order from N-terminus to C-terminus:
[0528] i) the AFP peptide epitope; and
[0529] ii) the first class I MHC polypeptide; and
   b5) a second polypeptide comprises, in order from N-terminus to C-terminus:
[0530] i) at least one immunomodulatory polypeptide; and
[0531] ii) the second class I MHC polypeptide; or
   a6) the first polypeptide comprises, in order from N-terminus to C-terminus:
[0532] i) the AFP peptide epitope;
[0533] ii) the first class I MHC polypeptide; and
[0534] iii) at least one immunomodulatory polypeptide; and
   b6) the second polypeptide comprises:
[0535] i) the second class I MHC polypeptide.

[0536] Aspect 62. A T-cell modulatory multimeric polypeptide of any one of aspects 55-61, wherein the first MHC polypeptide is a β2-microglobulin polypeptide; and wherein the second MHC polypeptide is an MHC class I heavy chain polypeptide.

[0537] Aspect 63. A T-cell modulatory multimeric polypeptide of any one of aspects 55-62, wherein the at least one immunomodulatory polypeptide is selected from the group consisting of a cytokine (e.g., an IL2 polypeptide, an IL7 polypeptide, an IL12 polypeptide, an IL15 polypeptide, an IL17 polypeptide, an IL21 polypeptide, an IL27 polypeptide, an IL-23 polypeptide, a TGFβ polypeptide, and the like; and including all family members, e.g., IL17A, IL-17B, IL-17C, IL-17D, IL-17E, IL-17F, IL-17E), a 4-1BBL polypeptide, an ICOS-L polypeptide, an OX-40L polypeptide, a CD80 polypeptide, a CD86 polypeptide, a CD40 polypeptide, a CD70 polypeptide, a JAG1 (CD339) polypeptide, an ICAM (CD540 polypeptide, a PD-L1 polypeptide, a FasL polypeptide, a PD-L2 polypeptide, a PD-1H (VISTA) polypeptide, an ICOS-L (CD275) polypeptide, a GITRL polypeptide, an HVEM polypeptide, a CXCL10 polypeptide, a CXCL9 polypeptide, a CXCL11 polypeptide, a CXCL13 polypeptide, and a CX3CL1 polypeptide, a Galectin-9 polypeptide, a CD83 polypeptide, a CD30L polypeptide, a HLA-G polypeptide, a MICA polypeptide, a MICB polypeptide, a HVEM (CD270) polypeptide, a lymphotoxin beta receptor polypeptide, a 3/TR6 polypeptide, an ILT3 polypeptide, an ILT4 polypeptide, a CXCL10 polypeptide, a CXCL9 polypeptide, a CXCL11 polypeptide, a CXCL13 polypeptide, and a CX3CL1 polypeptide, and combinations thereof.

[0538] Aspect 64. A T-cell modulatory multimeric polypeptide of any one of aspects 55-63, wherein the at least one immunomodulatory polypeptide is an IL-2 polypeptide.

[0539] Aspect 65. A T-cell modulatory multimeric polypeptide of any one of aspects 55-64, wherein the multimeric polypeptide comprises at least two immunomodulatory polypeptides, and wherein at least two of the immunomodulatory polypeptides are the same.

[0540] Aspect 66. A T-cell modulatory multimeric polypeptide of aspect 65, wherein the 2 or more immunomodulatory polypeptides are in tandem.

[0541] Aspect 67. The T-cell modulatory multimeric polypeptide of any one of aspects 55-66, wherein: a) a first disulfide bond is between: i) a Cys present in a linker between the AFP peptide epitope and the first MHC class I polypeptide, wherein the first MHC class I polypeptide is a β2M polypeptide; and ii) a Cys residue introduced via a Y84C substitution in the second MHC class I polypeptide, wherein the second MHC class I polypeptide is a MHC Class I heavy chain polypeptide; and b) a second disulfide bond is between: i) a Cys residue introduced into the β2M polypeptide via an R12C substitution; and ii) a Cys residue introduced into the MHC Class I heavy chain polypeptide via an A236C substitution.

[0542] Aspect 68. A T-cell modulatory multimeric polypeptide of aspect 67, wherein the linker comprises the amino acid sequence GCGGS (SEQ ID NO:318).

[0543] Aspect 69. A T-cell modulatory multimeric polypeptide of aspect 68, wherein the linker comprises the amino acid sequence GCGGS(GGGGS)n (SEQ ID NO:319), where n is an integer from 1 to 10.

[0544] Aspect 70. A T-cell modulatory multimeric polypeptide of any one of aspects 55-69, wherein the AFP peptide epitope has a length of from about 4 amino acids to about 15 amino acids.

[0545] Aspect 71. A T-cell modulatory multimeric polypeptide of any one of aspects 55-70, wherein the AFP peptide epitope comprises an amino acid sequence selected from:

AITRKMAAT (SEQ ID NO:479); AYTKKAPQL (SEQ ID NO:480); LLNQHACAV (SEQ ID
NO:481); KLVLDVAHV (SEQ ID NO:482); FMNKFIYEI (SEQ ID NO:483); SIPLFQVPE (SEQ ID
NO:484); LLNFTESRT (SEQ ID NO:485); FVQEATYKE (SEQ ID NO:486); ATYKEVSKM (SEQ ID
NO:487); KEVSKMVKD (SEQ ID NO:488); RHNCFLAHK (SEQ ID NO:489); ATAATCCQL (SEQ
ID NO:490); YIQESQALA (SEQ ID NO:491); QLTSSELMAI (SEQ ID NO:492); KLSQKFTKV (SEQ
ID NO:493); KELRESSLL (SEQ ID NO:494); SLVVDETYV (SEQ ID NO:495); ILLWAARYD (SEQ
ID NO:496); KIIPSCCKA (SEQ ID NO:497); CRGDVLDCL (SEQ ID NO:498); QQDTLSNKI (SEQ
ID NO:499); TMKQEFLINL (SEQ ID NO:500); NLVKQKPQI (SEQ ID NO:501); AVIADFSGL (SEQ
ID NO:502); LLACCEGAA (SEQ ID NO:503); LACGEGAAD (SEQ ID NO:504); KAPQLTSSEL
(SEQ ID NO:505); YICSQQDTL (SEQ ID NO:506); TECCKLTTL (SEQ ID NO:507); CTAEISLADL
(SEQ ID NO:508); VTKELRESSL (SEQ ID NO:509); IMSYICSQQD (SEQ ID NO:510); TRTFQAITV
(SEQ ID NO:511); FQKLGEYYL (SEQ ID NO:512); RVAKGYQEL (SEQ ID NO:513);
SYQCTAEISL (SEQ ID NO:514); KQEFLINLV (SEQ ID NO:515); MKWVESIFL (SEQ ID NO:516);
PVNPGVGQC (SEQ ID NO:517); AADIIIGHL (SEQ ID NO:518); QVPEPVTSC (SEQ ID NO:519);
TTLERGQCII (SEQ ID NO:520); KMAATAATC (SEQ ID NO:521); QAQGVALQTM (SEQ ID
NO:522); FQAITVTKL (SEQ ID NO:523); LLEKCFQTE (SEQ ID NO:524); VAYTKKAPQ (SEQ ID
NO:525); KYIQESQAL (SEQ ID NO:526); GVALQTMKQ (SEQ ID NO:527); GQEQEVCFA (SEQ
ID NO:528); SEEGRHNCFL (SEQ ID NO:529); RHPFLYAPTI (SEQ ID NO:530); TEIQKLVLDV
(SEQ ID NO:531); RRHPQLAVSV (SEQ ID NO:532); GEYYLQNAFL (SEQ ID NO:533);
NRRPCFSSLV (SEQ ID NO:534); LQTMKQEFLI (SEQ ID NO:535); IADFSGLLEK (SEQ ID
NO:536); GLLEKCCQGQ (SEQ ID NO:537); TLSNKITEC (SEQ ID NO:538); LQDGEKIMSY (SEQ
ID NO:539); GLFQKLGBY (SEQ ID NO:540); NEYGIASILD (SEQ ID NO:541); KMVKDALTAI
(SEQ ID NO:542); FLASFVHEY (SEQ ID NO:543); and AQFVQEATY (SEQ ID NO:544).

[0546] Aspect 72. A T-cell modulatory multimeric polypeptide of any one of aspects 55-70, wherein the APF peptide comprises the amino acid sequence KYIQESQAL (SEQ ID NO:526).

[0547] Aspect 73. A T-cell modulatory multimeric polypeptide of any one of aspects 55-72, wherein the first or the second MHC class I polypeptide comprises: a) an amino acid sequence having at least 95% amino acid sequence identity to the HLA-A*0101, HLA-A*0201, HLA-A*0201, HLA-A*1101, HLA-A*2301, HLA-A*2402, HLA-A*2407, HLA-A*3303, or HLA-A*3401 amino acid sequence depicted in FIG. 11A; or b) an amino acid sequence having at least 95% amino acid sequence identity to the HLA-B*0702, HLA-B*0801, HLA-B*1502, HLA-B*3802, HLA-B*4001, HLA-B*4601, or HLA-B*5301 amino acid sequence depicted in FIG. 12A; or c) an amino acid sequence having at least 95% amino acid sequence identity to the HLA-C*0102, HLA-C*0303, HLA-C*0304, HLA-C*0401, HLA-C*0602, HLA-C*0701, HLA-C*0702, HLA-C*0801, or HLA-C*1502 depicted in FIG. 13A.

[0548] Aspect 74. A T-cell modulatory multimeric polypeptide of any one of aspects 55-73, wherein the first MHC polypeptide is a β2M polypeptide, and wherein the second MHC polypeptide comprises an amino acid sequence having at least 95% amino acid sequence identity to an HLA-A*2402 polypeptide.

[0549] Aspect 75. A T-cell modulatory multimeric polypeptide of any one of aspects 55-73, wherein the first MHC polypeptide is a β2M polypeptide, and wherein the second MHC polypeptide is an HLA-A*1101 polypeptide.

[0550] Aspect 76. A T-cell modulatory multimeric polypeptide of any one of aspects 55-73, wherein the first MHC polypeptide is a β2M polypeptide, and wherein the second MHC polypeptide comprises an amino acid sequence having at least 95% amino acid sequence identity to an HLA-A*3303 polypeptide.

[0551] Aspect 77. A T-cell modulatory multimeric polypeptide of any one of aspects 55-73, wherein the first MHC polypeptide is a β2M polypeptide, and wherein the second MHC polypeptide comprises an amino acid sequence having at least 95% amino acid sequence identity to an HLA-A*0201 polypeptide.

[0552] Aspect 78. A T-cell modulatory multimeric polypeptide of any one of aspects 55-77, wherein the at least one immunomodulatory polypeptide is a variant IL-2 polypeptide comprising: i) an H16A substitution and an F42A substation; or ii) an H16T substitution and an F42A substitution.

[0553] Aspect 79. A T-cell modulatory multimeric polypeptide of any one of aspects 55-78, wherein the multimeric polypeptide comprises a first and a second heterodimer.

[0554] Aspect 80. A nucleic acid comprising a nucleotide sequence encoding a first or second polypeptide according to any one of aspects 55-79, wherein the first or second polypeptide comprises at least one immunomodulatory domain.

[0555] Aspect 81. An expression vector comprising the nucleic acid of aspect 80.

[0556] Aspect 82. A method of selectively modulating the activity of T cell specific for an alpha feto protein (AFP) epitope, the method comprising contacting the T cell with a T-cell modulatory multimeric polypeptide according to any one of aspects 55-79, wherein said contacting selectively modulates the activity of the AFP epitope-specific T cell.

[0557] Aspect 83. A method of treating a patient having a cancer, the method comprising administering to the patient an effective amount of a pharmaceutical composition comprising T-cell modulatory multimeric polypeptide according to any one of aspects 55-79.

[0558] Aspect 84. The method of aspect 83, wherein the cancer is expresses an alpha-feto protein.

[0559] Aspect 85. The method of aspect 83 or aspect 84, wherein the cancer is hepatocellular carcinoma, pancreatic cancer, stomach cancer, colorectal cancer, hepatoblastoma, or an ovarian yolk sac tumor.

[0560] Aspect 86. The method of any one of aspects 83-85, wherein said administering is intramuscular.

[0561] Aspect 87. The method of any one of aspects 83-85, wherein said administering is intravenous.

[0562] Aspect 88. A method of any one of aspects 83-87, further comprising administering one or more checkpoint inhibitors to the individual.

[0563] Aspect 89. A method according to aspect 88, wherein the checkpoint inhibitor is an antibody that binds to a polypeptide selected from the group consisting of CD27, CD28, CD40, CD122, CD96, CD73, CD47, OX40, GITR, CSF1R, JAK, PI3K delta, PI3K gamma, TAM, arginase, CD137, ICOS, A2AR, B7-H3, B7-H4, BTLA, CTLA-4, LAG3, TIM3, VISTA, CD96, TIGIT, CD122, PD-1, PD-L1, and PD-L2.

[0564] Aspect 90. A method according to aspect 89, wherein the checkpoint inhibitor is an antibody specific for PD-1, PD-L1, or CTLA4.

[0565] Aspect 91. A method according to aspect 88, wherein the one or more checkpoint inhibitors is selected from the group consisting of nivolumab, pembrolizumab, pidilizumab, AMP-224, MPDL3280A, MUX-1105, MEDI-4736, arelumab, ipilimumab, tremelimumab, pidilizumab, 1MP321, MGA271, BMS-986016, lirilumab, urelumab, PF-05082566, IPH2101, MEDI-6469, CP-870,893, Mogamulizumab, Varlilumab, Avelumab, Galiximab, AMP-514, AUNP 12, Indoximod, NLG-919, INCB024360, KN035, and combinations thereof.

[0566] Aspect 92. A method of modulating an immune response in an individual, the method comprising administering to the individual an effective amount of the T-cell modulatory multimeric polypeptide of any one of aspects 55-79, wherein said administering induces an epitope-specific T cell response and an epitope-non-specific T cell response, wherein the ratio of the epitope-specific T cell response to the epitope-non-specific T cell response is at least 2:1.

[0567] Aspect 93. A method of delivering an immunomodulatory polypeptide selectively to a target T cell, the method comprising contacting a mixed population of T cells with a T-cell modulatory multimeric polypeptide of any one of aspects 55-79, wherein the mixed population of T cells comprises the target T cell and non-target T cells, wherein the target T cell is specific for the AFP epitope present within the T-cell modulatory multimeric polypeptide, and wherein said contacting delivers the one or more immunomodulatory polypeptides present within the T-cell modulatory multimeric polypeptide to the target T cell.

[0568] Aspect 94. A method of detecting, in a mixed population of T cells obtained from an individual, the presence of a target T cell that binds an alpha-feto protein (AFP) epitope, the method comprising: a) contacting in vitro the mixed population of T cells with the T-cell modulatory multimeric polypeptide of any one of aspects 55-79, wherein the T-cell modulatory multimeric polypeptide comprises the AFP epitope; and b) detecting activation and/or proliferation of T cells in response to said contacting, wherein activated and/or proliferated T cells indicates the presence of the target T cell.

### Aspects Set B

[0569] Aspects, including embodiments, of the present subject matter described above may be beneficial alone or in combination, with one or more other aspects or embodiments. Without limiting the foregoing description, certain non-limiting aspects of the disclosure numbered 1-36 are provided below. As will be apparent to those of skill in the art upon reading this disclosure, each of the individually numbered aspects may be used or combined with any of the preceding or following individually numbered aspects. This is intended to provide support for all such combinations of aspects and is not limited to combinations of aspects explicitly provided below:

[0570] Aspect 1. A T-cell modulatory multimeric polypeptide comprising:

[0571] at least one heterodimer comprising:

[0572] a) a first polypeptide comprising:
[0573] i) an alpha-feto protein (AFP) peptide epitope, wherein the AFP peptide has a length of at least 4 amino acids; and
[0574] ii) first class I major histocompatibility complex (MHC) polypeptide;

[0575] b) a second class I polypeptide comprising a second MHC polypeptide, and

[0576] c) at least one activating immunomodulatory polypeptide,

[0577] wherein the first and/or the second polypeptide comprises the immunomodulatory polypeptide,

[0578] wherein the AFP peptide epitope comprises an amino acid sequence selected from the group consisting of:

AITRKMAAT (SEQ ID NO:479); AYTKKAPQL (SEQ ID NO:480);
LLNQHACAV (SEQ ID NO:481); KLVLDVAHV (SEQ ID NO:482); FMNKFIYEI (SEQ ID NO:483);
SIPLFQVPE (SEQ ID NO:484); LLNFTESRT (SEQ ID NO:485); FVQEATYKF (SEQ ID NO:486);
ATYKEVSKM (SEQ ID NO:487); KEVSKMVKD (SEQ ID NO:488); RHNCFLAHK (SEQ ID
NO:489); ATAATCCQL (SEQ ID NO:490); YIQESQALA (SEQ ID NO:491); QLTSSELMAI (SEQ ID
NO:492); KLSQKFTKV (SEQ ID NO:493); KELRESSLL (SEQ ID NO:494); SLVVDETYV (SEQ ID
NO:495); ILLWAARYD (SEQ ID NO:496); KIIPSCCKA (SEQ ID NO:497); CRGDVLDCL (SEQ ID
NO:498); QQDTLSNKI (SEQ ID NO:499); TMKQEFLINL (SEQ ID NO:500); NLVKQKPQI (SEQ ID
NO:501); AVIADFSGL (SEQ ID NO:502); LLACGEGAA (SEQ ID NO:503); LACGEGAAD (SEQ ID
NO:504); KAPQLTSSEL (SEQ ID NO:505); YICSQQDTL (SEQ ID NO:506); TECCKLTTL (SEQ ID
NO:507); CTAEISLADL (SEQ ID NO:508); VTKELRESSL (SEQ ID NO:509); IMSYICSQQD (SEQ
ID NO:510); TRTFQAITV (SEQ ID NO:511); FQKLGEYYL (SEQ ID NO:512); RVAKGYQEL (SEQ
ID NO:513); SYQCTAEISL (SEQ ID NO:514); KQEFLINLV (SEQ ID NO:515); MKWVESIFL (SEQ
ID NO:516); PVNPGVGQC (SEQ ID NO:517); AADIIIGHL (SEQ ID NO:518); QVPEPVTSC (SEQ
ID NO:519); TTLERGQCII (SEQ ID NO:520); KMAATAATC (SEQ ID NO:521); QAQGVALQTM
(SEQ ID NO:522); FQAITVTKL (SEQ ID NO:523); LLEKCFQTE (SEQ ID NO:524); VAYTKKAPQ
(SEQ ID NO:525); KYIQESQAL (SEQ ID NO:526); GVALQTMKQ (SEQ ID NO:527);
GQEQEVCFA (SEQ ID NO:528); SEEGRHNCFL (SEQ ID NO:529); RHPFLYAPTI (SEQ ID
NO:530); TEIQKLVLDV (SEQ ID NO:531); RRHPQLAVSV (SEQ ID NO:532); GEYYLQNAFL
(SEQ ID NO:533); NRRPCFSSLV (SEQ ID NO:534); LQTMKQEFLI (SEQ ID NO:535);
IADFSGLLEK (SEQ ID NO:536); GLLEKCCQGQ (SEQ ID NO:537); TLSNKITEC (SEQ ID
NO:538); LQDGEKIMSY (SEQ ID NO:539); GLFQKLGBY (SEQ ID NO:540); NEYGIASILD (SEQ
ID NO:541); KMVKDALTAI (SEQ ID NO:542); FLASFVHEY (SEQ ID NO:543); and AQFVQEATY
(SEQ ID NO:544),

optionally wherein the first or the second polypeptide comprises an immunoglobulin (Ig) Fc polypeptide.

[0579] Aspect 2. A T-cell modulatory multimeric polypeptide of aspect 1, wherein at least one of the at least one immunomodulatory polypeptide is a variant immunomodulatory polypeptide that exhibits reduced affinity to a cognate co-immunomodulatory polypeptide compared to the affinity of a corresponding wild-type immunomodulatory polypeptide for the cognate co-immunomodulatory polypeptide, and wherein the epitope binds to a T-cell receptor (TCR) on a T cell with an affinity of at least 10⁻⁷ M, such that:

[0580] i) the T-cell modulatory multimeric polypeptide binds to a first T cell with an affinity that is at least 25% higher than the affinity with which the T-cell modulatory multimeric polypeptide binds a second T cell, wherein the first T cell expresses on its surface the cognate co-immunomodulatory polypeptide and a TCR that binds the epitope with an affinity of at least 10⁻⁷ M, and wherein the second T cell expresses on its surface the cognate co-immunomodulatory polypeptide but does not express on its surface a TCR that binds the epitope with an affinity of at least 10⁻⁷ M; and/or

[0581] ii) the ratio of the binding affinity of a control T-cell modulatory multimeric polypeptide, wherein the control comprises a wild-type immunomodulatory polypeptide, to a cognate co-immunomodulatory polypeptide to the binding affinity of the T-cell modulatory multimeric polypeptide comprising a variant of the wild-type immunomodulatory polypeptide to the cognate co-immunomodulatory polypeptide, when measured by bio-layer interferometry, is in a range of from 1.5:1 to 10⁶:1.

[0582] Aspect 3. A T-cell modulatory multimeric polypeptide of aspect 2, wherein:

[0583] a) the T-cell modulatory multimeric polypeptide binds to the first T cell with an affinity that is at least 50%, at least 2-fold, at least 5-fold, or at least 10-fold higher than the affinity with which it binds the second T cell; and/or

[0584] b) the variant immunomodulatory polypeptide binds the co-immunomodulatory polypeptide with an affinity of from about 10⁻⁴ M to about 10⁻⁷ M, from about 10⁻⁴ M to about 10⁻⁶ M, from about 10⁴ M to about 10⁵ M; and/or

[0585] c) wherein the ratio of the binding affinity of a control T-cell modulatory multimeric polypeptide, wherein the control comprises a wild-type immunomodulatory polypeptide, to a cognate co-immunomodulatory polypeptide to the binding affinity of the T-cell modulatory multimeric polypeptide comprising a variant of the wild-type immunomodulatory polypeptide to the cognate co-immunomodulatory polypeptide, when measured by bio-layer interferometry, is at least 10:1, at least 50:1, at least 10²:1, or at least 10³:1.

[0586] Aspect 4. A T-cell modulatory multimeric polypeptide of any one of aspects 1-6, wherein

[0587] a1) the first polypeptide comprises, in order from N-terminus to C-terminus:
[0588] i) the AFP peptide epitope;
[0589] ii) the first MHC polypeptide; and
[0590] iii) at least one immunomodulatory polypeptide; and

[0591] b1) the second polypeptide comprises, in order from N-terminus to C-terminus:
[0592] i) the second MHC polypeptide; and
[0593] ii) an immunoglobulin (Ig) Fc polypeptide; or

[0594] a2) the first polypeptide comprises, in order from N-terminus to C-terminus:
[0595] i) the AFP peptide epitope; and
[0596] ii) the first MHC polypeptide; and

[0597] b2) the second polypeptide comprises, in order from N-terminus to C-terminus:
[0598] i) at least one immunomodulatory polypeptide;
[0599] ii) the second MHC polypeptide; and
[0600] iii) an Ig Fc polypeptide; or

[0601] a3) the first polypeptide comprises, in order from N-terminus to C-terminus:
[0602] i) the AFP peptide epitope; and
[0603] ii) the first MHC polypeptide; and

[0604] b3) the second polypeptide comprises, in order from N-terminus to C-terminus:
[0605] i) the second MHC polypeptide; and
[0606] ii) an Ig Fc polypeptide; and
[0607] iii) at least one immunomodulatory polypeptide; or

[0608] a4) the first polypeptide comprises, in order from N-terminus to C-terminus:
[0609] i) the AFP peptide epitope; and
[0610] ii) the first MHC polypeptide; and

[0611] b4) the second polypeptide comprises, in order from N-terminus to C-terminus:
[0612] i) the second MHC polypeptide; and
[0613] ii) at least one immunomodulatory polypeptide; or

[0614] a5) the first polypeptide comprises, in order from N-terminus to C-terminus:
[0615] i) the AFP peptide epitope; and
[0616] ii) the first MHC polypeptide; and

[0617] b5) a second polypeptide comprises, in order from N-terminus to C-terminus:
[0618] i) at least one immunomodulatory polypeptide; and
[0619] ii) the second MHC polypeptide; or

[0620] a6) the first polypeptide comprises, in order from N-terminus to C-terminus:
[0621] i) the AFP peptide epitope;
[0622] ii) the first MHC polypeptide; and
[0623] iii) at least one immunomodulatory polypeptide; and

[0624] b6) the second polypeptide comprises:
[0625] i) the second MHC polypeptide.

[0626] Aspect 5. AT-cell modulatory multimeric polypeptide of any one of aspects 1-4, wherein:
[0627] a) the first MHC polypeptide is a β2-microglobulin polypeptide; and the second MHC polypeptide is an MHC class I heavy chain polypeptide; or
[0628] b) the first MHC polypeptide is an MHC class I heavy chain polypeptide; and the second MHC polypeptide is a β2-microglobulin polypeptide.

[0629] Aspect 6. A T-cell modulatory multimeric polypeptide of aspect 5, wherein:
[0630] a) the first polypeptide comprises, in order from N-terminus to C-terminus:
   [0631] i) the AFP peptide epitope; and
   [0632] ii) the β2-microglobulin polypeptide; and
[0633] b) the second polypeptide comprises, in order from N-terminus to C-terminus:
   [0634] i) at least one immunomodulatory polypeptide;
   [0635] ii) the MHC class I heavy chain polypeptide; and
   [0636] iii) an Ig Fc polypeptide.

[0637] Aspect 7. A T-cell modulatory multimeric polypeptide of aspect 5, wherein:
[0638] a) the first polypeptide comprises, in order from N-terminus to C-terminus:
   [0639] i) the AFP peptide epitope; and
   [0640] ii) the β2-microglobulin polypeptide; and
[0641] b) the second polypeptide comprises, in order from N-terminus to C-terminus:
[0642] i) the MHC class I heavy chain polypeptide; and
[0643] ii) an Ig Fc polypeptide; and
   [0644] iii) at least one immunomodulatory polypeptide

[0645] Aspect 8. A T-cell modulatory multimeric polypeptide of any one of aspects 1-7, wherein the at least one immunomodulatory polypeptide is selected from the group consisting of a cytokine, a 4-1BBL polypeptide, an ICOS-L polypeptide, an OX-40L polypeptide, a CD80 polypeptide, a CD86 polypeptide, a CD40 polypeptide, a CD70 polypeptide, and combinations thereof.

[0646] Aspect 9. A T-cell modulatory multimeric polypeptide of any one of aspects 1-8, wherein the at least one immunomodulatory polypeptide is an IL-2 polypeptide.

[0647] Aspect 10. A T-cell modulatory multimeric polypeptide of any one of aspects 1-9, wherein the multimeric polypeptide comprises at least two immunomodulatory polypeptides, and wherein at least two of the immunomodulatory polypeptides are the same, optionally wherein the 2 or more immunomodulatory polypeptides are in tandem.

[0648] Aspect 11. A T-cell modulatory multimeric polypeptide of any One of aspects 1-10, wherein the immunomodulatory polypeptide is a variant IL-2 polypeptide that exhibits reduced affinity to an IL-2 receptor compared to the affinity of a wild-type IL-2 polypeptide for the IL-2 receptor.

[0649] Aspect 12. A T-cell modulatory multimeric polypeptide of aspect 11, wherein the variant IL-2 polypeptide comprises: i) an H16A substitution and an F42A substitution; or ii) an H16T substitution and an F42A substitution.

[0650] Aspect 13. A T-cell modulatory multimeric polypeptide of any one of aspects 1-12, wherein the first polypeptide and the second polypeptide are covalently linked to one another, optionally wherein the covalent linkage is via a disulfide bond.

[0651] Aspect 14. A T-cell modulatory multimeric polypeptide of any one of aspects 1-13, wherein the first MHC polypeptide or a linker between the epitope and the first MHC polypeptide comprises an amino acid substitution to provide a first Cys residue, wherein the second MHC polypeptide comprises an amino acid substitution to provide a second. Cys residue, and wherein the disulfide linkage is between the first and the second Cys residues.

[0652] Aspect 15. The T-cell modulatory multimeric polypeptide of any one of aspects 1-14, wherein the polypeptide comprises a disulfide bond between: i) a Cys present in a linker between the AFP peptide epitope and the first MHC class I polypeptide, wherein the first MHC class I polypeptide is a β2M polypeptide; and ii) a Cys residue introduced via a Y84C substitution in the second MHC class I polypeptide, wherein the second MHC class I polypeptide is a MHC Class I heavy chain polypeptide.

[0653] Aspect 16. The T-cell modulatory multimeric polypeptide of any one of aspects 1-14, wherein the polypeptide comprises a disulfide bond between i) a Cys residue introduced into the first MHC class I polypeptide via an R12C substitution, wherein the first MHC class I polypeptide is a β2M polypeptide; and ii) a Cys residue introduced into the second MHC class I polypeptide, via an A236C substitution, wherein second MHC class I polypeptide is an MHC Class I heavy chain polypeptide.

[0654] Aspect 17. The T-cell modulatory multimeric polypeptide of any one of aspects 1-14, wherein the polypeptide comprises a first disulfide bond between: i) a Cys present in a linker between the AFP peptide epitope and the first MHC class I polypeptide, wherein the first MHC class I polypeptide is a β2M polypeptide; and ii) a Cys residue introduced via a Y84C substitution in the second MHC class I polypeptide, wherein the second MHC class I polypeptide is a MHC Class I heavy chain polypeptide, and a second disulfide bond between i) a Cys residue introduced into the β2M polypeptide via an R12C substitution; and ii) a Cys residue introduced into the MHC Class I heavy chain polypeptide via an A236C substitution.

[0655] Aspect 18. A T-cell modulatory multimeric polypeptide of aspect 15 or aspect 17, wherein the linker between the AFP peptide epitope and the first MHC is GCGGS(G4S)n (SEQ ID NO:315), where n is 1, 2, 3, 4, 5, 6, 7, 8, or 9.

[0656] Aspect 19. A T-cell modulatory multimeric polypeptide of any one of aspects 1-18, wherein the AFP peptide epitope has a length of from about 4 amino acids to about 25 amino acids.

[0657] Aspect 20. A I-cell modulatory multimeric polypeptide of any one of aspects 0.1-19, wherein the APF peptide comprises the amino acid sequence KYIQESQAL (SEQ ID NO:526).

[0658] Aspect 21. A T-cell modulatory multimeric polypeptide of any one of aspects 1-20, wherein the first or the second MHC polypeptide comprises:

[0659] a) an amino acid sequence having at least 95% amino acid sequence identity to the HLA-A*0101, HLA-A*0201, HLA-A*0201, HLA-A*1101, HLA-A*2301, HLA-A*2402, HLA-A*3303, or HLA-A*3401 amino acid sequence depicted in FIG. 11A; or

[0660] b) an amino acid sequence having at least 95% amino acid sequence identity to the HLA-B*0702, HLA-B*0801, HLA-B*1502, HLA-B*3802, HLA-B*4001, HLA-B*4601, or HLA-B*5301 amino acid sequence depicted in FIG. 12A; or

[0661] c) an amino acid sequence having at least 95% amino acid sequence identity to the HLA-C*0102, HLA-C*0303, HLA-C*0304, HLA-C*0401, HLA-C*0602, HLA-C*0701, HLA-C*0702, HLA-C*0801, or HLA-C*1502 depicted in FIG. 13A.

[0662] Aspect 22. A T-cell modulatory multimeric polypeptide of any one of aspects 1-20, wherein the first MC polypeptide is a β2M polypeptide, and wherein the second MHC polypeptide comprises an amino acid sequence having at least 95% amino acid sequence identity to an HLA-A*2402 polypeptide.

[0663] Aspect 23. A T-cell modulatory multimeric polypeptide of any one of aspects 1-20, wherein the first MHC polypeptide is a β2M polypeptide, and wherein the second MHC polypeptide comprises an amino acid sequence having at least 95% amino acid sequence identity to an HLA-A*0201 polypeptide.

[0664] Aspect 24. A T-cell modulatory multimeric polypeptide of any one of aspects 1-23, wherein the multimeric polypeptide comprises a first and a second heterodimer, and wherein the first and second heterodimers are covalently bound by one or more disulfide bonds between the Ig Fc polypeptides of the first and second heterodimers.

[0665] Aspect 25. A nucleic acid comprising a nucleotide sequence encoding a first or second polypeptide according to any one of aspects 1-24.

[0666] Aspect 26. An expression vector comprising the nucleic acid of aspect 25.

[0667] Aspect 27. A method of selectively modulating the activity of T cell specific for an alpha-feto protein (AFP) epitope, the method comprising contacting the T cell with a T-cell modulatory multimeric polypeptide according to any one of aspects 1-24, wherein said contacting selectively modulates the activity of the AFP epitope-specific T cell.

[0668] Aspect 28. A method of treating a patient having a cancer, the method comprising administering to the patient an effective amount of a pharmaceutical composition comprising T-cell modulatory multimeric polypeptide according to any one of aspects 1-24.

[0669] Aspect 29. The method of aspect 28, wherein the cancer is hepatocellular carcinoma, pancreatic cancer, stomach cancer, colorectal cancer, hepatoblastoma, or an ovarian yolk sac tumor.

[0670] Aspect 30. A method of aspect 28 or aspect 29, further comprising administering one or more checkpoint inhibitors to the individual.

[0671] Aspect 31. A method according to aspect 30, wherein the checkpoint inhibitor is an antibody that binds to a polypeptide selected from the group consisting of CD27, CD28, CD40, CD122, CD96, CD73, CD47, OX40, GITR, CSF1R, JAK, PI3K delta, PI3K gamma, TAM, arginase, CD137, ICOS, A2AR, B7-H3, B7-H4, BTLA, CTLA-4, LAG3, TIM3, VISTA, CD96, CD122, PD-1, PD-L1, and PD-L2.

[0672] Aspect 32. A method according to aspect 31, wherein the checkpoint inhibitor is an antibody specific for PD-1, PD-L1, or CTLA4.

[0673] Aspect 33. A method according to aspect 30, wherein the one or more checkpoint inhibitors is selected from the group consisting of nivolumab, pembrolizumab, pidilizumab, AMP-224, MPDL3280A, MDX-1105, MEDI-4736, arelumab, ipilimumab, tremelimumab, pidilizumab, IMP321, MGA271, BMS-986016, lirilumab, urelumab, PF-05082566, IPH2101, MEDI-6469, CP-870,893, Mogamulizumab, Varlilumab, Avelumab, Galiximab, AMP-514, AUNP 12, Indoximod, NLG-919, INCB024360, KN035, and combinations thereof.

[0674] Aspect 34. A method of modulating an immune response in an individual, the method comprising administering to the individual an effective amount of the T-cell modulatory multimeric polypeptide of any one of aspects 1-24,

[0675] wherein said administering induces an epitope-specific T cell response and an epitope-non-specific T cell response, and

[0676] wherein the ratio of the epitope-specific T cell, response to the epitope-non-specific T cell response is at least 2:1.

[0677] Aspect 35. A method of delivering an immunomodulatory polypeptide selectively to a target T cell, the method comprising contacting a mixed population of T cells with a T-cell modulatory multimeric polypeptide of any one of aspects 1-24, wherein the mixed population of T cells comprises the target T cell and non-target T cells, wherein the target T cell is specific for the AFP epitope present within the T-cell modulatory multimeric polypeptide, and wherein said contacting delivers the one or more immunomodulatory polypeptides present within the T-cell modulatory multimeric polypeptide to the target T cell.

[0678] Aspect 36. A method of detecting, in a mixed population of T cells obtained from an individual, the presence of a target T cell that binds an AFP epitope, the method comprising:

[0679] a) contacting in vitro the mixed population of T cells with the T-cell modulatory multimeric polypeptide of any one of aspects 1-24, wherein the T-cell modulatory multimeric polypeptide comprises the AFP epitope; and

[0680] b) detecting activation and/or proliferation of T cells in response to said contacting, wherein activated and/or proliferated T cells indicates the presence of the target T cell.

### EXAMPLES

[0681] The following examples are put forth so as to provide those of ordinary skill in the art with a complete disclosure and description of how to make and use the present invention, and are not intended to limit the scope of what the inventors regard as their invention nor are they intended to represent that the experiments below are all or the only experiments performed. Efforts have been made to ensure accuracy with respect to numbers used (e.g. amounts, temperature, etc.) but some experimental errors and deviations should be accounted for. Unless indicated otherwise, parts are parts by weight, molecular weight is weight average molecular weight, temperature is in degrees Celsius, and pressure is at or near atmospheric. Standard abbreviations may be used, e.g., bp, base pair(s); kb, kilobase(s); pl, picoliter(s); s or sec, second(s); min, minute(s); h or hr, hour(s); aa, amino acid(s); kb, kilobase(s); bp, base pair(s); nt, nucleotide(s); i.m., intramuscular(ly); i.p., intraperitoneal(ly); s.c., subcutaneous(ly); and the like.

### Example 1

[0682] Isolated peripheral blood mononuclear cells (PBMC) from 15 healthy HLA-A2 donors were thawed and seeded in an IFN-γ Elispot plate (StemCell) at either 100,000 or 300,000 cells per well. Cells were stimulated with or without 10 μM AFP(158-166) peptide for 20-24 hours at 37° C. and 5% CO₂. Following stimulation, the Elispot was developed according to manufacturer's instructions. Fold change over background was calculated by dividing the number of spots in peptide stimulated wells by the number of spots in the peptide-less well. The data, depicted in FIG. 7A, are presented as mean+/−standard deviation. The data show that 5 of 15 healthy PBMC samples are reactive to AFP(158-166) at Day 0. The data thus show the prevalence of T cell responses to AFP among healthy HLA-A2 individuals.

[0683] Isolated PBMCs from Donor 1 and Donor 16 were thawed and seeded in an IFN-γ Elispot plate at 300,000 cells per well. Cells were then treated with or without 1.875 μg/mL of the pan-Class I blocking antibody w6/32 (Biolegend), and incubated at 37° C. and 5% CO₂ for 30 minutes. Cells were then stimulated with or without 10 μM AFP(158-166) peptide for 20 hours at 37° C. and 5% CO₂. Following stimulation, the Elispot was developed according to manufacturer's instructions. Data, depicted in FIG. 7B, are presented as mean+/−standard deviation for three technical replicates. The data in FIG. 7B demonstrate that the AFP-specific T cell response depends on recognition of HLA class I.

[0684] The data in FIG. 7A-7B indicate that a significant fraction of HLA-A2+ individuals should respond to a synTac comprising an AFP peptide and an HLA-A2 H-chain.

[0685] The effect of a synTac comprising an AFP peptide and an HLA-A2 H-chain on CD8⁺ T cells was determined.

[0686] Expansion: Isolated PBMC from Donor 1 were thawed and seeded in T25 flasks at 11×10⁶ or 13×10⁶ cells per flask in 5 mL ImmunoCult™ cell culture medium and stimulated with a final concentration of synTac at 100 nM. Culture media was changed as needed (typically on D4, D7, and D9), by removing 2.5 mL of culture, then counting and recording cell number and viability. The 2.5 mL of culture was then spun at 350 RCF for 6 minutes at 22° C. 1 mL of supernatant was then removed and frozen at 20° C. for future cytokine experiments. The remaining 1.5 mL of supernatant was aspirated. The cells were resuspended in 2.5 mL of fresh, pre-warmed ImmunoCult™ and added hack to the original flask. The flasks were incubated at 37° C. and 5% CO₂ for the duration of the expansion.

[0687] The synTacs designated “R12C” and “G2C” did not contain interchain disulfide bonds. The synTac designated “R12C:G2C” contained an interchain disulfide bond, i.e., a disulfide bond between: i) a first polypeptide chain containing the AFP(158-166) peptide and the β2M; and ii) a second polypeptide chain containing the HLA-A02 H chain. The disulfide bond in the synTac designated “R12C:G2C” was between an R12C substitution in the β2M polypeptide of the first polypeptide chain and a linker comprising a Gly-to-Cys substitution in the second polypeptide chain.

[0688] ELISPOT: Day 0 control: Isolated CD8⁺ T cells from Donor 1 were seeded in an IFN-γ Elispot plate at 40,000 cells per well. The cells were then stimulated with our without 1 μM AFP(158-166) for 24 hours at 37° C. and 5% CO₂. Following stimulation, the Elispot was developed according to manufacturer's instructions. Day 10 expanded samples: Following the 10-day expansion protocol, CD8⁺ T cells were isolated and seeded in an IFN-γ Elispot plate at 20,000 cells per well. Cells in the 10 μM cohort were then treated with or without 1.875 μg/mL of the pan-Class I blocking antibody w6/32 (Biolegend), and incubated at 37° C. and 5% CO₂ for 30 minutes. Cells were then stimulated with or without either: i) 1 μM AFP(158-166); or ii) 10 μM AFP(158-166), for 24 hours at 37° C. and 5% CO₂. Following stimulation, the Elispot was developed according to manufacturer's instructions.

[0689] The fold change was calculated by dividing the number of spots in the peptide-stimulated wells (or synTac-stimulated wells) by the number of spots in the peptide-less wells. The data, shown in FIG. 8, are presented as mean+/−standard deviation for three technical replicates.

[0690] The data in FIG. 8 show synTac-mediated expansion of AFP/HLA-A2-specific T cells over 10 days. AFP/HLA-A2-specific CD8⁺ T cells from Donor 1 were able to proliferate in response to an AFP/HLA-A2 directed syn ac.

### Example 2

[0691] The effect of linking the two polypeptide chains of a TMMP heterodimer via two disulfide bonds on stability and production was tested.

[0692] The following TMMPs were generated: a) a TMMP comprising 1715+2364 polypeptides; b) a TMMP comprising 2405+2760 polypeptides; and c) a TMMP comprising 1380+2218. The amino acid sequences of the polypeptide chains are provided in FIG. 17A-17C. As shown in FIG. 18, all 3 TMMPs included: i) Class I HLA-A heavy chain polypeptides of the A02:01 allele; ii) AFP (158-166) peptide; and iii) two copies of IL2 (H16A; F42A) immunomodulatory (“MOD”) polypeptides. Each of the TMMPs is a homodimer of a heterodimer comprising: i) the 1715 and 2364 polypeptides; ii) the 2405+2760 polypeptides; or iii) the 1380+2218 polypeptides. Thus, the TMMPs included: i) 2 copies of the 1715+2364 heterodimer, linked by 2 disulfide bonds between the IgFc polypeptide present in the 1715 polypeptides; ii) 2 copies of the 2405+2760 heterodimer, linked by 2 disulfide bonds between the IgFc polypeptide present in the 2405 polypeptides; or iii) 2 copies of the 1380+2218 heterodimer, linked by 2 disulfide bonds between the IgFc polypeptide present in the 1380 polypeptides. This arrangement is depicted schematically in FIG. 16C.

[0693] TMMP 1715+2364 is a double disulfide-linked heterodimer: a) a first disulfide linkage is between: i) the Cys present in the linker between the AFP peptide and the β2M chain in the 2364 polypeptide; and ii) the Cys introduced by the Y84C substitution in the Class I heavy chain present in the 1715 polypeptide; and b) a second disulfide linkages is between: i) the Cys introduced by the R12C substitution in the β2M polypeptide present in the 2364 polypeptide; and ii) the Cys introduced by the A236C substitution in the Class I heavy chain present in the 1715 polypeptide.

[0694] TMMP 2405+2760 is a single disulfide-linked heterodimer. The single disulfide bond is between: i) the Cys present in the linker between the AFP peptide and the β2M chain in the 2760 polypeptide; and ii) the Cys introduced by the Y84C substitution in the Class I heavy chain present in the 2405 polypeptide.

[0695] TMMP 1380+2218 is a single disulfide-linked heterodimer. The single disulfide bond is between: i) the Cys introduced by the R12C substitution in the β2M polypeptide present in the 2218 polypeptide; and ii) the Cys introduced by the A236C substitution in the Class I heavy chain present in the 1380 polypeptide.

[0696] The TMMPs were produced in ExpiCHO cells (adapted from Chinese hamster ovary (CHO) cells; ThermoFisher; see, e.g., Jain et al. (2017) Protein Expr. Purif. 134:38) and were purified from the cell culture medium in which the cells were grown. Two purification steps were carried out. In a first step, the cell culture medium was clarified, and the clarified cell culture medium was subjected to Protein A column purification. In the second purification step, the eluate from the Protein A column was subjected to size exclusion chromatography.

[0697] The stability of the purified TMMPs was tested. The amount of heterodimeric TMMP present was determined after storage of the purified TMMPs in a liquid solution (phosphate-buffered saline (PBS) containing 365 mM NaCl, pH 7.4) for 28 days at 37° C. or for 28 days at 42° C.

[0698] In addition, the purified TMMPs were subjected to 3 freeze/thaw cycles.

[0699] The results are depicted in FIG. 18. As shown in FIG. 18, homodimeric forms of the heterodimers (referred to in FIG. 18 as “monomer”) represented 61%, 68%, or 77%, of the eluate from the Protein A column for 1380-2218, 2405-2760, and 1715-2364, respectively.

[0700] As shown in FIG. 18, TMMP 1715+2364 was more stable than both TMMP 2405+2760 and TMMP 1380+2218 to storage at 37° C. or at 42° C. for 28 days. Of note, 85% of 1715-2364 remained in the homodimeric form of the heterodimer after 28 days of storage at 42° C., while only 65% and 13%, respectively, of 2405-2760 and 1380-2218 remained in the homodimeric form of the heterodimer after 28 days of storage at 42° C.

[0701] Homodimeric forms of heterodimers 1380-2218, 2405-2760, and 1715-2364 were found to be stable to 3 freeze/thaw cycles.

[0702] Unfolding temperatures of the peptide/HLA, IL-2, and Fc domains of various TMMPs, expressed as Tₘ (° C.), are provided in FIG. 18. In addition, the temperature at which aggregation occurs (Tₘ ° C.) is provided in FIG. 18.

### Example 3

[0703] The effect of the TMMPs described in Example 2 on proliferation of CF8⁺ T cells was determined.

[0704] On Day 0, human PBMCs were incubated in vitro with TMMP 1715+2364 (R12C:G2C; double disulfide linked heterodimer), TMMP 2405+2760 (G2C; single disulfide linked heterodimer), or TMMP 1380+2218 (R12C; single disulfide linked heterodimer), to generate in vitro expanded PBMCs.

[0705] On Day 10, CD8⁺ T cells were purified from the generate in vitro expanded PBMCs. The purified CD8⁺ T cells were stimulated with: i) 1 μM AFP (158-166) peptide; ii) 10 μM AFP (158-166) peptide; or iii) 10 μM AFP (158-166) peptide and W6/32, a pan MHC Class I blocking monoclonal antibody.

[0706] The results are shown in FIG. 19. As shown in FIG. 19, incubation of PBMCs with TMMP 1715+2364 (R12C:G2C; double disulfide linked heterodimer) resulted in more proliferation of CD8⁺ T cells than did TMMP 2405+2760 (G2C; single disulfide linked heterodimer), or TMMP 1380+2218 (R12C; single disulfide linked heterodimer).

[0707] While the present invention has been described with reference to the specific embodiments thereof, it should be understood by those skilled in the art that various changes may be made and equivalents may be substituted without departing from the true spirit and scope of the invention. In addition, many modifications may be made to adapt a particular situation, material, composition of matter, process, process step or steps, to the objective, spirit and scope of the present invention. All such modifications are intended to be within the scope of the claims appended hereto.

1.-36. (canceled)

37. A T-cell modulatory multimeric polypeptide comprising:
at least one heterodimer comprising:
a) a first polypeptide comprising:
i) an alpha-feto protein (AFP) peptide epitope, wherein the AFP peptide has a length of from about 4 amino acids to about 25 amino acids; and
ii) a first class I major histocompatibility complex (MHC) polypeptide, wherein the first MHC polypeptide is a β2-microglobulin (β2M) polypeptide;
b) a second class I polypeptide comprising a second MHC polypeptide, wherein the second MHC polypeptide is an MHC class I heavy chain polypeptide, and
c) at least one immunomodulatory polypeptide that can cause an increase in the cytotoxic activity of a T cell and/or the number of T cells,
wherein the first and/or the second polypeptide comprises the at least one immunomodulatory polypeptide,
wherein the first or the second polypeptide comprises an immunoglobulin (Ig) Fc polypeptide, and wherein the T-cell modulatory multimeric polypeptide comprises:
a first disulfide bond formed between (i) a Cys residue in a Cys-containing linker between the AFP peptide epitope and the β2M polypeptide, and (ii) a Cys residue in the MHC class I heavy chain polypeptide; and
a second disulfide bond formed between a Cys residue in the β2M polypeptide and a Cys residue in the MHC class I heavy chain polypeptide,
optionally wherein the T-cell modulatory multimeric polypeptide comprises a linker between one or more of: i) the first or the second class I MHC polypeptide and the Ig Fc polypeptide; ii) an immunomodulatory polypeptide and the first or the second class I MHC polypeptide; and iii) a first and a second immunomodulatory polypeptide.

38. A T-cell modulatory multimeric polypeptide of claim 37, wherein
a) the first polypeptide comprises, in order from N-terminus to C-terminus:
i) the AFP peptide epitope;
ii) the Cys-containing linker;
ii) the β2M polypeptide; and
iii) at least one immunomodulatory polypeptide; and
b) the second polypeptide comprises, in order from N-terminus to C-terminus:
i) the MHC class I heavy chain polypeptide; and
ii) the Ig Fc polypeptide,
optionally wherein the T-cell modulatory multimeric polypeptide comprises a linker between one or both of: i) the β2M polypeptide and the at least one immunomodulatory polypeptide; and ii) the MHC class I heavy chain polypeptide and the Ig Fc polypeptide.

39. A T-cell modulatory multimeric polypeptide of claim 37, wherein:
a) the first polypeptide comprises, in order from N-terminus to C-terminus:
i) the AFP peptide epitope;
ii) the Cys-containing linker; and
ii) the β2-microglobulin polypeptide; and
b) the second polypeptide comprises, in order from N-terminus to C-terminus:
i) at least one immunomodulatory polypeptide;
ii) the MHC class I heavy chain polypeptide; and
iii) the Ig Fc polypeptide,
optionally wherein the T-cell modulatory multimeric polypeptide comprises a linker between one or both of: i) the at least one immunomodulatory polypeptide and the MHC class I heavy chain polypeptide; and ii) the MHC class I heavy chain polypeptide and the Ig Fc polypeptide.

40. A T-cell modulatory multimeric polypeptide of claim 37, wherein:
a) the first polypeptide comprises, in order from N-terminus to C-terminus:
i) the AFP peptide epitope;
ii) the Cys-containing linker; and
ii) the β2-microglobulin polypeptide; and
b) the second polypeptide comprises, in order from N-terminus to C-terminus:
i) the MHC class I heavy chain polypeptide; and
ii) the Ig Fc polypeptide; and
iii) at least one immunomodulatory polypeptide,
optionally wherein the T-cell modulatory multimeric polypeptide comprises a linker between one or both of: i) the MHC class I heavy chain polypeptide and the Ig Fc polypeptide; and ii) the Ig Fc polypeptide and the at least one immunomodulatory polypeptide.

41. A T-cell modulatory multimeric polypeptide of claim 37, wherein the at least one immunomodulatory polypeptide is selected from the group consisting of a cytokine, a 4-1BBL polypeptide, an ICOS-L polypeptide, an OX-40L polypeptide, a CD80 polypeptide, a CD86 polypeptide, a CD40 polypeptide, a CD70 polypeptide, and combinations thereof.

42. A T-cell modulatory multimeric polypeptide of claim 41, wherein the multimeric polypeptide comprises at least two immunomodulatory polypeptides, and wherein at least two of the immunomodulatory polypeptides are the same, optionally wherein the 2 or more immunomodulatory polypeptides are in tandem and may be joined by a linker.

43. A T-cell modulatory multimeric polypeptide of claim 41, wherein the at least one immunomodulatory polypeptide is an IL-2 polypeptide that exhibits reduced affinity to an IL-2 receptor compared to the affinity of a wild-type IL-2 polypeptide for the IL-2 receptor.

44. A T-cell modulatory multimeric polypeptide of claim 43, wherein the variant IL-2 polypeptide comprises: i) an H16A substitution and an F42A substitution; or ii) an H16T substitution and an F42A substitution.

45. A T-cell modulatory multimeric polypeptide of claim 44, wherein the multimeric polypeptide comprises two variant IL-2 polypeptides in tandem, and wherein each variant IL-2 polypeptide comprises an H16A substitution and an F42A substitution, and wherein the variant IL-2 polypeptides are joined by a linker.

46. The T-cell modulatory multimeric polypeptide of claim 37, wherein
(i) the first disulfide bond is between: i) a Cys present in the Cys-containing linker between the AFP peptide epitope and the β2M polypeptide; and ii) a Cys residue introduced via a Y84C substitution in the MHC class I heavy chain polypeptide; and/or
(ii) the second disulfide bond is between i) a Cys residue introduced into the β2M polypeptide via an R12C substitution; and ii) a Cys residue introduced into the MHC class I heavy chain polypeptide via an A236C substitution.

47. A T-cell modulatory multimeric polypeptide of claim 37, wherein the AFP peptide comprises the amino acid sequence KYIQESQAL (SEQ ID NO:526).

48. A T-cell modulatory multimeric polypeptide of claim 37, wherein the multimeric polypeptide comprises a first and a second heterodimer, and wherein the first and second heterodimers are covalently bound by one or more disulfide bonds between the Ig Fc polypeptides of the first and second heterodimers.

49. A nucleic acid comprising a nucleotide sequence encoding the first and/or the second polypeptide according to claim 37.

50. An expression vector comprising the nucleic acid of claim 49.

51. A method of selectively modulating the activity of T cell specific for an alpha-feto protein (AFP) epitope, the method comprising contacting the T cell with a T-cell modulatory multimeric polypeptide according to claim 37, wherein said contacting selectively modulates the activity of the AFP epitope-specific T cell.

52. A method of treating a patient having a cancer, the method comprising administering to the patient an effective amount of a pharmaceutical composition comprising T-cell modulatory multimeric polypeptide according to claim 37.

53. A method of claim 52, further comprising administering one or more checkpoint inhibitors to the individual.

54. A method of modulating an immune response in an individual, the method comprising administering to the individual an effective amount of the T-cell modulatory multimeric polypeptide of claim 37,
wherein said administering induces an epitope-specific T cell response and an epitope-non-specific T cell response, and
wherein the ratio of the epitope-specific T cell response to the epitope-non-specific T cell response is at least 2:1.

55. A method of delivering an immunomodulatory polypeptide selectively to a target T cell, the method comprising contacting a mixed population of T cells with a T-cell modulatory multimeric polypeptide of claim 37, wherein the mixed population of T cells comprises the target T cell and non-target T cells, wherein the target T cell is specific for the AFP epitope present within the T-cell modulatory multimeric polypeptide, and wherein said contacting delivers the one or more immunomodulatory polypeptides present within the T-cell modulatory multimeric polypeptide to the target T cell.

56. A method of detecting, in a mixed population of T cells obtained from an individual, the presence of a target T cell that binds an AFP epitope, the method comprising:
a) contacting in vitro the mixed population of T cells with the T-cell modulatory multimeric polypeptide of claim 37, wherein the T-cell modulatory multimeric polypeptide comprises the AFP epitope; and
b) detecting activation and/or proliferation of T cells in response to said contacting, wherein activated and/or proliferated T cells indicates the presence of the target T cell.

The application's sequence listing, which the Patent Office published only in electronic form, follows.

SEQUENCE LISTING (556 sequences)

SEQ ID NO: 1 - protein, 245 aa, Homo sapiens
MRIFAVFIFMTYWHLLNAFTVTVPKDLYVVEYGSNMTIECKFPVEKQLDLAALIVYWEMEDKNIIQFVHGEEDLKVQHSSYRQRARLLKDQLSLGNAALQITDVKLQDAGVYRCMISYGGADYKRITVKVNAPYNKINQRILVVDPVTSEHELTCQAEGYPKAEVIWTSSDHQVLSGKTTTTNSKREEKLFNVTSTLRINTTTNEIFYCTFRRLDPEENHTAELVIPGNILNVSIKICLTLSPST

SEQ ID NO: 2 - protein, 219 aa, Homo sapiens
FTVTVPKDLYVVEYGSNMTIECKFPVEKQLDLAALIVYWEMEDKNIIQFVHGEEDLKVQHSSYRQRARLLKDQLSLGNAALQITDVKLQDAGVYRCMISYGGADYKRITVKVNAPYNKINQRILVVDPVTSEHELTCQAEGYPKAEVIWTSSDHQVLSGKTTTTNSKREEKLFNVTSTLRINTTTNEIFYCTFRRLDPEENHTAELVIPGNILNVSIKI

SEQ ID NO: 3 - protein, 268 aa, Homo sapiens
PGWFLDSPDRPWNPPTFSPALLVVTEGDNATFTCSFSNTSESFVLNWYRMSPSNQTDKLAAFPEDRSQPGQDCRFRVTQLPNGRDFHMSVVRARRNDSGTYLCGAISLAPKAQIKESLRAELRVTERRAEVPTAHPSPSPRPAGQFQTLVVGVVGGLLGSLVLLVWVLAVICSRAARGTIGARRTGQPLKEDPSAVPVFSVDYGELDFQWREKTPEPPVPCVPEQTEYATIVFPSGMGTSSPARRGSADGPRSAQPLRPEDGHCSWPL

SEQ ID NO: 4 - protein, 208 aa, Homo sapiens [sequence omitted]

SEQ ID NO: 5 - protein, 220 aa, Homo sapiens
MLRLLLALNLFPSIQVTGNKILVKQSPMLVAYDNAVNLSCKYSYNLFSREFRASLHKGLDSAVEVCVVYGNYSQQLQVYSKTGFNCDGKLGNESVTFYLQNLYVNQTDIYFCKIEVMYPPPYLDNEKSNGTIIHVKGKHLCPSPLFPGPSKPFWVLVVVGGVLACYSLLVTVAFIIFWVRSKRSRLLHSDYMNMTPRRPGPTRKHYQPYAPPRDFAAYRS

SEQ ID NO: 6 - protein, 123 aa, Homo sapiens
MLRLLLALNLFPSIQVTGNKILVKQSPMLVAYDNAVNLSWKHLCPSPLFPGPSKPFWVLVVVGGVLACYSLLVTVAFIIFWVRSKRSRLLHSDYMNMTPRRPGPTRKHYQPYAPPRDFAAYRS

SEQ ID NO: 7 - protein, 101 aa, Homo sapiens
MLRLLLALNLFPSIQVTGKHLCPSPLFPGPSKPFWVLVVVGGVLACYSLLVTVAFIIFWVRSKRSRLLHSDYMNMTPRRPGPTRKHYQPYAPPRDFAAYRS

SEQ ID NO: 8 - protein, 224 aa, Homo sapiens
APLKIQAYFNETADLPCQFANSQNQSLSELVVFWQDQENLVLNEVYLGKEKFDSVHSKYMNRTSFDSDSWTLRLHNLQIKDKGLYQCIIHHKKPTGMIRIHQMNSELSVLANFSQPEIVPISNITENVYINLTCSSIHGYPEPKKMSVLLRTKNSTIEYDGIMQKSQDNVTELYDVSISLSVSFPDVTSNMTIFCILETDKTRLLSSPFSIELEDPQPPPDHIP

SEQ ID NO: 9 - protein, 110 aa, Homo sapiens
APLKIQAYFNETADLPCQFANSQNQSLSELVVFWQDQENLVLNEVYLGKEKFDSVHSKYMNRTSFDSDSWTLRLHNLQIKDKGLYQCIIHHKKPTGMIRIHQMNSELSVL

SEQ ID NO: 10 - protein, 254 aa, Homo sapiens
MEYASDASLDPEAPWPPAPRARACRVLPWALVAGLLLLLLLAAACAVFLACPWAVSGARASPGSAASPRLREGPELSPDDPAGLLDLRQGMFAQLVAQNVLLIDGPLSWYSDPGLAGVSLTGGLSYKEDTKELVVAKAGVYYVFFQLELRRVVAGEGSGSVSLALHLQPLRSAAGAAALALTVDLPPASSEARNSAFGFQGRLLHLSAGQRLGVHLHTEARARHAWQLTQGATVLGLFRVTPEIPAGLPSPRSE

SEQ ID NO: 11 - protein, 174 aa, Homo sapiens
PAGLLDLRQGMFAQLVAQNVLLIDGPLSWYSDPGLAGVSLTGGLSYKEDTKELVVAKAGVYYVFFQLELRRVVAGEGSGSVSLALHLQPLRSAAGAAALALTVDLPPASSEARNSAFGFQGRLLHLSAGQRLGVHLHTEARARHAWQLTQGATVLGLFRVTPEIPAGLPSPRSE

SEQ ID NO: 12 - protein, 175 aa, Homo sapiens
DPAGLLDLRQGMFAQLVAQNVLLIDGPLSWYSDPGLAGVSLTGGLSYKEDTKELVVAKAGVYYVFFQLELRRVVAGEGSGSVSLALHLQPLRSAAGAAALALTVDLPPASSEARNSAFGFQGRLLHLSAGQRLGVHLHTEARARHAWQLTQGATVLGLFRVTPEIPAGLPSPRSE

SEQ ID NO: 13 - protein, 167 aa, Homo sapiens
DPAGLLDLRQGMFAQLVAQNVLLIDGPLSWYSDPGLAGVSLTGGLSYKEDTKELVVAKAGVYYVFFQLELRRVVAGEGSGSVSLALHLQPLRSAAGAAALALTVDLPPASSEARNSAFGFQGRLLHLSAGQRLGVHLHTEARARHAWQLTQGATVLGLFRVTPEIPA

SEQ ID NO: 14 - protein, 255 aa, Homo sapiens
MGNSCYNIVATLLLVLNFERTRSLQDPCSNCPAGTFCDNNRNQICSPCPPNSFSSAGGQRTCDICRQCKGVFRTRKECSSTSNAECDCTPGFHCLGAGCSMCEQDCKQGQELTKKGCKDCCFGTFNDQKRGICRPWTNCSLDGKSVLVNGTKERDVVCGPSPADLSPGASSVTPPAPAREPGHSPQIISFFLALTSTALLFLLFFLTLRFSVVKRGRKKLLYIFKQPFMRPVQTTQEEDGCSCRFPEEEEGGCEL

SEQ ID NO: 15 - protein, 133 aa, Homo sapiens [sequence omitted]

SEQ ID NO: 16 - protein, 251 aa, Homo sapiens
ELCDDDPPEIPHATFKAMAYKEGTMLNCECKRGFRRIKSGSLYMLCTGNSSHSSWDNQCQCTSSATRNTTKQVTPQPEEQKERKTTEMQSPMQPVDQASLPGHCREPPPWENEATERIYHFVVGQMVYYQCVQGYRALHRGPAESVCKMTHGKTRWTQPQLICTGEMETSQFPGEEKPQASPEGRPESETSCLVTTTDFQIQTEMAATMETSIFTTEYQVAVAGCVFLLISVLLLSGLTWQRRQRKSRRTI

SEQ ID NO: 17 - protein, 524 aa, Homo sapiens
VNGTSQFTCFYNSRANISCVWSQDGALQDTSCQVHAWPDRRRWNQTCELLPVSQASWACNLILGAPDSQKLTTVDIVTLRVLCREGVRWRVMAIQDFKPFENLRLMAPISLQVVHVETHRCNISWEISQASHYFERHLEFEARTLSPGHTWEEAPLLTLKQKQEWICLETLTPDTQYEFQVRVKPLQGEFTTWSPWSQPLAFRTKPAALGKDTIPWLGHLLVGLSGAFGFIILVYLLINCRNTGPWLKKVLKCNTPDPSKFFSQLSSEHGGDVQKWLSSPFPSSSFSPGGLAPEISPLEVLERDKVTQLLLQQDKVPEPASLSSNHSLTSCFTNQGYFFFHLPDALEIEACQVYFTYDPYSEEDPDEGVAGAPTGSSPQPLQPLSGEDDAYCTFPSRDDLLLFSPSLLGGPSPPSTAPGGSGAGEERMPPSLQERVPRDWDPQPLGPPTPGVPDLVDFQPPPELVLREAGEEVPDAGPREGVSFPWSRPPGQGEFRALNARLPLNTDAYLSLQELQGQDPTHLV

SEQ ID NO: 18 - protein, 347 aa, Homo sapiens
LNTTILTPNGNEDTTADFFLTTMPTDSLSVSTLPLPEVQCFVFNVEYMNCTWNSSSEPQPTNLTLHYWYKNSDNDKVQKCSHYLFSEEITSGCQLQKKEIHLYQTFVVQLQDPREPRRQATQMLKLQNLVIPWAPENLTLHKLSESQLELNWNNRFLNHCLEHLVQYRTDWDHSWTEQSVDYRHKFSLPSVDGQKRYTFRVRSRFNPLCGSAQHWSEWSHPIHWGSNTSKENPFLFALEAVVISVGSMGLIISLLCVYFWLERTMPRIPTLKNLEDLVTEYHGNFSAWSGVSKGLAESLQPDYSERLCLVSEIPPKGGALGEGPGASPCNQHSPYWAPPCYTLKPET

SEQ ID NO: 19 - protein, 119 aa, Homo sapiens
MSRSVALAVLALLSLSGLEAIQRTPKIQVYSRHPAENGKSNFLNCYVSGFHPSDIEVDLLKNGERIEKVEHSDLSFSKDWSFYLLYYTEFTPTEKDEYACRVNHVTLSQPKIVKWDRDM

SEQ ID NO: 20 - protein, 119 aa, Macaca mulatta
MSRSVALAVLALLSLSGLEAIQRTPKIQVYSRHPPENGKPNFLNCYVSGFHPSDIEVDLLKNGEKMGKVEHSDLSFSKDWSFYLLYYTEFTPNEKDEYACRVNHVTLSGPRTVKWDRDM

SEQ ID NO: 21 - protein, 118 aa, Bos Taurus
MARFVALVLLGLLSLSGLDAIQRPPKIQVYSRHPPEDGKPNYLNCYVYGFHPPQIEIDLLKNGEKIKSEQSDLSFSKDWSFYLLSHAEFTPNSKDQYSCRVKHVTLEQPRIVKWDRDL

SEQ ID NO: 22 - protein, 119 aa, Mus musculus
MARSVTLVFLVLVSLTGLYAIQKTPQIQVYSRHPPENGKPNILNCYVTQFHPPHIEIQMLKNGKKIPKVEMSDMSFSKDWSFYILAHTEFTPTETDTYACRVKHASMAEPKTVYWDRDM

SEQ ID NO: 23 - protein, 365 aa, Homo sapiens
MAVMAPRTLLLLLSGALALTQTWAGSHSMRYFFTSVSRPGRGEPRFIAVGYVDDTQFVRFDSDAASQKMEPRAPWIEQEGPEYWDQETRNMKAHSQTDRANLGTLRGYYNQSEDGSHTIQIMYGCDVGPDGRFLRGYRQDAYDGKDYIALNEDLRSWTAADMAAQITKRKWEAVHAAEQRRVYLEGRCVDGLRRYLENGKETLQRTDPPKTHMTHHPISDHEATLRCWALGFYPAEITLTWQRDGEDQTQDTELVETRPAGDGTFQKWAAVVVPSGEEQRYTCHVQHEGLPKPLTLRWELSSQPTIPIVGIIAGLVLLGAVITGAVVAAVMWRRKSSDRKGGSYTQAASSDSAQGSDVSLTACKV

SEQ ID NO: 24 - protein, 365 aa, Homo sapiens
MAVMAPRTLLLLLSGALALTQTWAGSHSMRYFYTSVSRPGRGEPRFIAVGYVDDTQFVRFDSDAASQRMEPRAPWIEQEGPEYWDQETRNVKAQSQTDRVDLGTLRGYYNQSEDGSHTIQIMYGCDVGPDGRFLRGYRQDAYDGKDYIALNEDLRSWTAADMAAQITKRKWEAAHAAEQQRAYLEGRCVEWLRRYLENGKETLQRTDPPKTHMTHHPISDHEATLRCWALGFYPAEITLTWQRDGEDQTQDTELVETRPAGDGTFQKWAAVVVPSGEEQRYTCHVQHEGLPKPLTLRWELSSQPTIPIVGIIAGLVLLGAVITGAVVAAVMWRRKSSDRKGGSYTQAASSDSAQGSDVSLTACKV

SEQ ID NO: 25 - protein, 365 aa, Homo sapiens [sequence omitted]

SEQ ID NO: 26 - protein, 365 aa, Homo sapiens [sequence omitted]

SEQ ID NO: 27 - protein, 362 aa, Homo sapiens
MLVMAPRTVLLLLSAALALTETWAGSHSMRYFYTSVSRPGRGEPRFISVGYVDDTQFVRFDSDAASPREEPRAPWIEQEGPEYWDRNTQIYKAQAQTDRESLRNLRGYYNQSEAGSHTLQSMYGCDVGPDGRLLRGHDQYAYDGKDYIALNEDLRSWTAADTAAQITQRKWEAAREAEQRRAYLEGECVEWLRRYLENGKDKLERADPPKTHVTHHPISDHEATLRCWALGFYPAEITLTWQRDGEDQTQDTELVETRPAGDRTFQKWAAVVVPSGEEQRYTCHVQHEGLPKPLTLRWEPSSQSTVPIVGIVAGLAVLAVVVIGAVVAAVMCRRKSSGGKGGSYSQAACSDSAQGSDVSLTA

SEQ ID NO: 28 - protein, 366 aa, Homo sapiens
MRVMAPRALLLLLSGGLALTETWACSHSMRYFDTAVSRPGRGEPRFISVGYVDDTQFVRFDSDAASPRGEPRAPWVEQEGPEYWDRETQNYKRQAQADRVSLRNLRGYYNQSEDGSHTLQRMYGCDLGPDGRLLRGYDQSAYDGKDYIALNEDLRSWTAADTAAQITQRKLEAARAAEQLRAYLEGTCVEWLRRYLENGKETLQRAEPPKTHVTHHPLSDHEATLRCWALGFYPAEITLTWQRDGEDQTQDTELVETRPAGDGTFQKWAAVVVPSGQEQRYTCHMQHEGLQEPLTLSWEPSSQPTIPIMGIVAGLAVLVVLAVLGAVVTAMMCRRKSSGGKGGSCSQAACSNSAQGSDESLITCKA

SEQ ID NO: 29 - protein, 276 aa, Artificial sequence
  synthetic sequence
  Misc_feature (9)..(9): X is phenylalanine, tyrosine, serine, or threonine
  Misc_feature (44)..(44): X is lysine or arginine
  Misc_feature (62)..(62): X is glutamine, glycine, glutamic acid, or arginine
  Misc_feature (63)..(63): X is asparagine or glutamic acid
  Misc_feature (65)..(65): X is arginine or glycine
  Misc_feature (66)..(66): X is asparagine or lysine
  Misc_feature (67)..(67): X is methionine or valine
  Misc_feature (70)..(70): X is histidine or glutamine
  Misc_feature (73)..(73): X is threonine or isoleucine
  Misc_feature (74)..(74): X is aspartic acid or histidine
  Misc_feature (76)..(76): X is alanine, valine, or glutamic acid
  Misc_feature (77)..(77): X is asparagine or aspartic acid
  Misc_feature (79)..(79): X is glycine or arginine
  Misc_feature (80)..(80): X is threonine or arginine
  Misc_feature (81)..(81): X is leucine or alanine
  Misc_feature (82)..(82): X is arginine or leucine
  Misc_feature (83)..(83): X is glycine ir arginine
  Misc_feature (90)..(90): X is alanine or aspartic acid
  Misc_feature (95)..(95): X is isoleucine, leucine, or valine
  Misc_feature (97)..(97): X is isoleucine, arginine, or methionine
  Misc_feature (99)..(99): X is phenylalanine or tyrosine
  Misc_feature (105)..(105): X is serine or proline
  Misc_feature (107)..(107): X is tryptophan or glycine
  Misc_feature (114)..(114): X is arginine, histidine, or glutamine
  Misc_feature (116)..(116): X is aspartic acid or tyrosine
  Misc_feature (127)..(127): X is asparagine or lysine
  Misc_feature (142)..(142): X is threonine or isoleucine
  Misc_feature (144)..(144): X is lysine or glutamine
  Misc_feature (145)..(145): X is arginine or histidine
  Misc_feature (149)..(149): X is alanine or threonine
  Misc_feature (150)..(150): X is alanine or valine
  Misc_feature (151)..(151): X is histidine or arginine
  Misc_feature (156)..(156): X is arginine, leucine, glutamine, or tryptophan
  Misc_feature (158)..(158): X is valine or alanine
  Misc_feature (161)..(161): X is aspartic acid or glutamic acid
  Misc_feature (163)..(163): X is arginine or threonine
  Misc_feature (166)..(166): X is aspartic acid or glutamic acid
  Misc_feature (167)..(167): X is tryptophan or glycine
  Misc_feature (184)..(184): X is proline or alanine
  Misc_feature (193)..(193): X is proline or alanine
  Misc_feature (194)..(194): X is valine or isoleucine
  Misc_feature (207)..(207): X is serine or glycine
  Misc_feature (246)..(246): X is alanine or serine
  Misc_feature (253)..(253): X is glutamine or glutamic acid
  Misc_feature (276)..(276): X is proline or leucine
GSHSMRYFXTSVSRPGRGEPRFIAVGYVDDTQFVRFDSDAASQXMEPRAPWIEQEGPEYWDXXTXXXKAXSQXXRXXLXXXXXYYNQSEXGSHTXQXMXGCDVGXDXRFLRGYXQXAYDGKDYIALXEDLRSWTAADMAAQXTXXKWEXXXEAEQXRXYLXGXCVXXLRRYLENGKETLQRTDXPKTHMTHHXXSDHEATLRCWALXFYPAEITLTWQRDGEDQTQDTELVETRPAGDGTFQKWAXVVVPSGXEQRYTCHVQHEGLPKPLTLRWEX

SEQ ID NO: 30 - protein, 276 aa, Artificial sequence
  synthetic sequence
  Misc_feature (9)..(9): X is histidinem tyrosine, or aspartic acid
  Misc_feature (11)..(11): X is alanien or serine
  Misc_feature (12)..(12): X is methionine or valine
  Misc_feature (24)..(24): X is alanine, serine, or threonine
  Misc_feature (32)..(32): X is glutamie or leucine
  Misc_feature (41)..(41): X is alanine or threonine
  Misc_feature (45)..(45): X is glutamic acid, methionine, lysine, or threonine
  Misc_feature (46)..(46): X is alanine or threonine
  Misc_feature (63)..(63): X is glutamic acid or asparagine
  Misc_feature (66)..(66): X is isoleucine or lysine
  Misc_feature (67)..(67): X is tyrosine, phenylalanie, serine, or cystine
  Misc_feature (70)..(70): X is asparagine or glutamine
  Misc_feature (71)..(71): X is alanine or threonine
  Misc_feature (74)..(74): X is aspartic acid or tyrosine
  Misc_feature (76)..(76): X is glutamic acid or valine
  Misc_feature (77)..(77): X is serine or asparagine
  Misc_feature (80)..(80): X is threonine, asparagine, or isoleucine
  Misc_feature (81)..(81): X is alanine or leucine
  Misc_feature (82)..(82): X is leucine or arginine
  Misc_feature (83)..(83): X is arginine or glycine
  Misc_feature (94)..(94): X is threonine or isoleucine
  Misc_feature (95)..(95): X is leucine or isoleucine
  Misc_feature (97)..(97): X is arginine or serine
  Misc_feature (131)..(131): X is arginine or serine
  Misc_feature (143)..(143): X is S or T
  Misc_feature (147)..(147): X is L or W
  misc_feature (152)..(152): Xaa is E OR V
  misc_feature (156)..(156): Xaa is R, D, L
  misc_feature (158)..(158): Xaa A or T
  Misc_feature (163)..(163): X is leucine, glutamic acid, or threonine
  Misc_feature (177)..(177): X is glutamic acid or aspartic acid
  Misc_feature (178)..(178): X is lysine or threonine
  Misc_feature (180)..(180): X is glutamic acid or glutamine
  Misc_feature (194)..(194): X is isoleucine or valine
GSHSMRYFXTXXSRPGRGEPRFIXVGYVDDTXFVRFDSDAXSPRXXPRAPWIEQEGPEYWDRXTQXXKTXXTQXYXXNLXXXXYYNQSEAGSHXXQXMYGCDLGPDGRLLRGHDQSAYDGKDYIALNEDLXSWTAADTAAQIXQRKXEAARXAEQXRXYLEGXCVEWLRRYLENGKXXLXRADPPKTHVTHHPXSDHEATLRCWALGFYPAEITLTWQRDGEDQTQDTELVETRPAGDRTFQKWAAVVVPSGEEQRYTCHVQHEGLPKPLTLRWEP

SEQ ID NO: 31 - protein, 276 aa, Artificial sequence
  synthetic sequence
  Misc_feature (1)..(1): X is cysteine or glycine
  Misc_feature (6)..(6): X is arginine or lysine
  Misc_feature (9)..(9): X is phenylalanine, tyrosine, serine, or aspartic acid
  Misc_feature (14)..(14): X is arginine or tryptophan
  Misc_feature (21)..(21): X is histidine or arginine
  Misc_feature (24)..(24): X is alanine or serine
  Misc_feature (35)..(35): X is glutamine or arginine
  Misc_feature (49)..(49): X is alanine or arginine
  Misc_feature (66)..(66): X is asparagine, or lysine
  Misc_feature (73)..(73): X is threonine or alanine
  Misc_feature (77)..(77): X is serine or asparagine
  Misc_feature (80)..(80): X is asparagine or lysine
  Misc_feature (90)..(90): X is alanine or aspartic acid
  Misc_feature (91)..(91): X is glycine or arginine
  Misc_feature (94)..(94): X is threonine or isoleucine
  Misc_feature (95)..(95): X is leucine or isoleucine
  Misc_feature (97)..(97): X is tryptophan or arginine
  Misc_feature (99)..(99): X is cysteine, tyrosine, phenylalanine, or serine
  Misc_feature (103)..(103): X is leucine or valine
  Misc_feature (113)..(113): X is tyrosine or histidine
  Misc_feature (114)..(114): X is aspartic acid or asparagine
  Misc_feature (116)..(116): X is tyrosine, phenylalanine, serine, or leucine
  Misc_feature (147)..(147): X is leucine or tryptophan
  Misc_feature (152)..(152): X is glutamic acid, alanine, or threonine
  Misc_feature (156)..(156): X is arginine, leucine, or tryptophan
  Misc_feature (163)..(163): X is leucine or threonine
  Misc_feature (173)..(173): X is glutamic acid or lysine
  Misc_feature (177)..(177): X is glutamic acid or lysine
  Misc_feature (184)..(184): X is histidine or proline
  Misc_feature (194)..(194): X is arginine or valine
  Misc_feature (219)..(219): X is tryptophan or arginine
  Misc_feature (248)..(248): X is valine or methionine
  Misc_feature (253)..(253): X is glutamic acid or lysine
  Misc_feature (261)..(261): X is methionine or valine
  Misc_feature (267)..(267): X is proline or glutamine
  Misc_feature (273)..(273): X is arginine or serine
  Misc_feature (275)..(275): X is proline or glycine
XSHSMXYFXTAVSXPGRGEPXFIXVGYVDDTQFVXFDSDAASPRGEPRXPWVEQEGPEYWDRETQXYKRQAQXDRVXLRXLRGYYNQSEXXSHXXQXMXGCDXGPDGRLLRGXXQXAYDGKDYIALNEDLRSWTAADTAAQITQRKXEAARXAEQXRAYLEGXCVEWLRRYLXNGKXTLQRAEXPKTHVTHHPXSDHEATLRCWALGFYPAEITLTWQXDGEDQTQDTELVETRPAGDGTFQKWAAVXVPSGXEQRYTCHXQHEGLXEPLTLXWXP

SEQ ID NO: 32 - protein, 284 aa, Artificial sequence
  synthetic sequence
  misc_feature (89)..(89): Xaa is K or E
  misc_feature (107)..(107): Xaa is R or G
  misc_feature (157)..(157): Xaa is R or G
  misc_feature (158)..(158): Xaa is A or V
  misc_feature (255)..(255): Xaa is Q or P
  misc_feature (267)..(267): Xaa is P or S
GSHSLKYFHTSVSRPGRGEPRFISVGYVDDTQFVRFDNDAASPRMVPRAPWMEQEGSEYWDRETRSARDTAQIFRVNLRTLRGYYNQSXAGSHTLQWMHGCELGPDXRFLRGYEQFAYDGKDYLTLNEDLRSWTAVDTAAQISEQKSNDASEAEHQXXYLEDTCVEWLHKYLEKGKETLLHLEPPKTHVTHHPISDHEATLRCWALGFYPAEITLTWQQDGEGHTQDTELVETRPAGDGTFQKWAAVVVPSGEEXRYTCHVQHEGLXEPVTLRWKPASQPTIPI

SEQ ID NO: 33 - protein, 284 aa, Artificial sequence
  synthetic sequence
  misc_feature (7)..(7): Xaa is Y or F
  misc_feature (50)..(50): Xaa is P or Q
  misc_feature (251)..(251): Xaa is S or P
  misc_feature (278)..(278): Xaa is P or L
GSHSLRXFSTAVSRPGRGEPRYIAVEYVDDTQFLRFDSDAAIPRMEPREXWVEQEGPQYWEWTTGYAKANAQTDRVALRNLLRRYNQSEAGSHTLQGMNGCDMGPDGRLLRGYHQHAYDGKDYISLNEDLRSWTAADTVAQITQRFYEAEEYAEEFRTYLEGECLELLRRYLENGKETLQRADPPKAHVAHHPISDHEATLRCWALGFYPAEITLTWQRDGEEQTQDTELVETRPAGDGTFQKWAAVVVPXGEEQRYTCHVQHEGLPQPLILRWEQSXQPTIPI

SEQ ID NO: 34 - protein, 284 aa, Artificial sequence
  synthetic sequence
  misc_feature (13)..(13): Xaa is S or F
  misc_feature (27)..(27): Xaa is Y or H
  misc_feature (31)..(31): Xaa is T, S, or M
  misc_feature (34)..(34): Xaa is L or V
  misc_feature (54)..(54): Xaa is Q or R
  misc_feature (81)..(81): Xaa is P or L
  misc_feature (100)..(100): Xaa is G or D
  misc_feature (104)..(104): Xaa is G or V
  misc_feature (105)..(105): Xaa is S or C
  misc_feature (110)..(110): Xaa is L or I
  misc_feature (159)..(159): Xaa is Y or H
  misc_feature (169)..(169): Xaa is H or R
  misc_feature (171)..(171): Xaa is Y or H
  misc_feature (178)..(178): Xaa is M or T
  misc_feature (185)..(185): Xaa is P or A
  misc_feature (219)..(219): Xaa is R, W, or Q
  misc_feature (258)..(258): Xaa is T or M
  misc_feature (275)..(275): Xaa is K or E
GSHSMRYFSAAVXRPGRGEPRFIAMGXVDDXQFXRFDSDSACPRMEPRAPWVEXEGPEYWEEETRNTKAHAQTDRMNLQTXRGYYNQSEASSHTLQWMIXCDLXXDGRLXRGYEQYAYDGKDYLALNEDLRSWTAADTAAQISKRKCEAANVAEQRRAXLEGTCVEWLXRXLENGKEXLQRADPXKTHVTHHPVFDYEATLRCWALGFYPAEIILTWQXDGEDQTQDVELVETRPAGDGTFQKWAAVVVPSGEEQRYXCHVQHEGLPEPLMLRWXQSSLPTIPI

SEQ ID NO: 35 - protein, 276 aa, Artificial sequence; identical to SEQ ID NO: 29
  synthetic sequence
  Misc_feature (9)..(9): X is phenylalanine, tyrosine, serine, or threonine
  Misc_feature (44)..(44): X is lysine or arginine
  Misc_feature (62)..(62): X is glutamine, glycine, glutamic acid, or arginine
  Misc_feature (63)..(63): X is asparagine or glutamic acid
  Misc_feature (65)..(65): X is arginine or glycine
  Misc_feature (66)..(66): X is asparagine or lysine
  Misc_feature (67)..(67): X is methionine or valine
  Misc_feature (70)..(70): X is histidine or glutamine
  Misc_feature (73)..(73): X is threonine or isoleucine
  Misc_feature (74)..(74): X is aspartic acid or histidine
  Misc_feature (76)..(76): X is alanine, valine, or glutamic acid
  Misc_feature (77)..(77): X is asparagine or aspartic acid
  Misc_feature (79)..(79): X is glycine or arginine
  Misc_feature (80)..(80): X is threonine or arginine
  Misc_feature (81)..(81): X is leucine or alanine
  Misc_feature (82)..(82): X is arginine or leucine
  Misc_feature (83)..(83): X is glycine ir arginine
  Misc_feature (90)..(90): X is alanine or aspartic acid
  Misc_feature (95)..(95): X is isoleucine, leucine, or valine
  Misc_feature (97)..(97): X is isoleucine, arginine, or methionine
  Misc_feature (99)..(99): X is phenylalanine or tyrosine
  Misc_feature (105)..(105): X is serine or proline
  Misc_feature (107)..(107): X is tryptophan or glycine
  Misc_feature (114)..(114): X is arginine, histidine, or glutamine
  Misc_feature (116)..(116): X is aspartic acid or tyrosine
  Misc_feature (127)..(127): X is asparagine or lysine
  Misc_feature (142)..(142): X is threonine or isoleucine
  Misc_feature (144)..(144): X is lysine or glutamine
  Misc_feature (145)..(145): X is arginine or histidine
  Misc_feature (149)..(149): X is alanine or threonine
  Misc_feature (150)..(150): X is alanine or valine
  Misc_feature (151)..(151): X is histidine or arginine
  Misc_feature (156)..(156): X is arginine, leucine, glutamine, or tryptophan
  Misc_feature (158)..(158): X is valine or alanine
  Misc_feature (161)..(161): X is aspartic acid or glutamic acid
  Misc_feature (163)..(163): X is arginine or threonine
  Misc_feature (166)..(166): X is aspartic acid or glutamic acid
  Misc_feature (167)..(167): X is tryptophan or glycine
  Misc_feature (184)..(184): X is proline or alanine
  Misc_feature (193)..(193): X is proline or alanine
  Misc_feature (194)..(194): X is valine or isoleucine
  Misc_feature (207)..(207): X is serine or glycine
  Misc_feature (246)..(246): X is alanine or serine
  Misc_feature (253)..(253): X is glutamine or glutamic acid
  Misc_feature (276)..(276): X is proline or leucine

SEQ ID NO: 36 - protein, 276 aa, Artificial sequence; identical to SEQ ID NO: 30
  synthetic sequence
  Misc_feature (9)..(9): X is histidinem tyrosine, or aspartic acid
  Misc_feature (11)..(11): X is alanine or serine
  Misc_feature (12)..(12): X is methionine or valine
  Misc_feature (24)..(24): X is alanine, serine, or threonine
  Misc_feature (32)..(32): X is glutamie or leucine
  Misc_feature (41)..(41): X is alanine or threonine
  Misc_feature (45)..(45): X is glutamic acid, methionine, lysine, or threonine
  Misc_feature (46)..(46): X is alanine or threonine
  Misc_feature (63)..(63): X is glutamic acid or asparagine
  Misc_feature (66)..(66): X is isoleucine or lysine
  Misc_feature (67)..(67): X is tyrosine, phenylalanie, serine, or cystine
  Misc_feature (70)..(70): X is asparagine or glutamine
  Misc_feature (71)..(71): X is alanine or threonine
  Misc_feature (74)..(74): X is aspartic acid or tyrosine
  Misc_feature (76)..(76): X is glutamic acid or valine
  Misc_feature (77)..(77): X is serine or asparagine
  Misc_feature (80)..(80): X is threonine, asparagine, or isoleucine
  Misc_feature (81)..(81): X is alanine or leucine
  Misc_feature (82)..(82): X is leucine or arginine
  Misc_feature (83)..(83): X is arginine or glycine
  Misc_feature (94)..(94): X is threonine or isoleucine
  Misc_feature (95)..(95): X is leucine or isoleucine
  Misc_feature (97)..(97): X is arginine or serine
  Misc_feature (131)..(131): X is arginine or serine
  Misc_feature (143)..(143): X is S or T
  Misc_feature (147)..(147): X is L or W
  misc_feature (152)..(152): Xaa is E OR V
  misc_feature (156)..(156): Xaa is R, D, L
  misc_feature (158)..(158): Xaa A or T
  Misc_feature (163)..(163): X is leucine, glutamic acid, or threonine
  Misc_feature (177)..(177): X is glutamic acid or aspartic acid
  Misc_feature (178)..(178): X is lysine or threonine
  Misc_feature (180)..(180): X is glutamic acid or glutamine
  Misc_feature (194)..(194): X is isoleucine or valine

SEQ ID NO: 37 - protein, 276 aa, Artificial sequence; identical to SEQ ID NO: 31
  synthetic sequence
  Misc_feature (1)..(1): X is cysteine or glycine
  Misc_feature (6)..(6): X is arginine or lysine
  Misc_feature (9)..(9): X is phenylalanine, tyrosine, serine, or aspartic acid
  Misc_feature (14)..(14): X is arginine or tryptophan
  Misc_feature (21)..(21): X is histidine or arginine
  Misc_feature (24)..(24): X is alanine or serine
  Misc_feature (35)..(35): X is glutamine or arginine
  Misc_feature (49)..(49): X is alanine or arginine
  Misc_feature (66)..(66): X is asparagine, or lysine
  Misc_feature (73)..(73): X is threonine or alanine
  Misc_feature (77)..(77): X is serine or asparagine
  Misc_feature (80)..(80): X is asparagine or lysine
  Misc_feature (90)..(90): X is alanine or aspartic acid
  Misc_feature (91)..(91): X is glycine or arginine
  Misc_feature (94)..(94): X is threonine or isoleucine
  Misc_feature (95)..(95): X is leucine or isoleucine
  Misc_feature (97)..(97): X is tryptophan or arginine
  Misc_feature (99)..(99): X is cysteine, tyrosine, phenylalanine, or serine
  Misc_feature (103)..(103): X is leucine or valine
  Misc_feature (113)..(113): X is tyrosine or histidine
  Misc_feature (114)..(114): X is aspartic acid or asparagine
  Misc_feature (116)..(116): X is tyrosine, phenylalanine, serine, or leucine
  Misc_feature (147)..(147): X is leucine or tryptophan
  Misc_feature (152)..(152): X is glutamic acid, alanine, or threonine
  Misc_feature (156)..(156): X is arginine, leucine, or tryptophan
  Misc_feature (163)..(163): X is leucine or threonine
  Misc_feature (173)..(173): X is glutamic acid or lysine
  Misc_feature (177)..(177): X is glutamic acid or lysine
  Misc_feature (184)..(184): X is histidine or proline
  Misc_feature (194)..(194): X is arginine or valine
  Misc_feature (219)..(219): X is tryptophan or arginine
  Misc_feature (248)..(248): X is valine or methionine
  Misc_feature (253)..(253): X is glutamic acid or lysine
  Misc_feature (261)..(261): X is methionine or valine
  Misc_feature (267)..(267): X is proline or glutamine
  Misc_feature (273)..(273): X is arginine or serine
  Misc_feature (275)..(275): X is proline or glycine

SEQ ID NO: 38 - protein, 284 aa, Artificial sequence; identical to SEQ ID NO: 32
  synthetic sequence
  misc_feature (89)..(89): Xaa is K or E
  misc_feature (107)..(107): Xaa is R or G
  misc_feature (157)..(157): Xaa is R or G
  misc_feature (158)..(158): Xaa is A or V
  misc_feature (255)..(255): Xaa is Q or P
  misc_feature (267)..(267): Xaa is P or S

SEQ ID NO: 39 - protein, 284 aa, Artificial sequence; identical to SEQ ID NO: 33
  synthetic sequence
  misc_feature (7)..(7): Xaa is Y or F
  misc_feature (50)..(50): Xaa is P or Q
  misc_feature (251)..(251): Xaa is S or P
  misc_feature (278)..(278): Xaa is P or L

SEQ ID NO: 40 - protein, 284 aa, Artificial sequence; identical to SEQ ID NO: 34
  synthetic sequence
  misc_feature (13)..(13): Xaa is S or F
  misc_feature (27)..(27): Xaa is Y or H
  misc_feature (31)..(31): Xaa is T, S, or M
  misc_feature (34)..(34): Xaa is L or V
  misc_feature (54)..(54): Xaa is Q or R
  misc_feature (81)..(81): Xaa is P or L
  misc_feature (100)..(100): Xaa is G or D
  misc_feature (104)..(104): Xaa is G or V
  misc_feature (105)..(105): Xaa is S or C
  misc_feature (110)..(110): Xaa is L or I
  misc_feature (159)..(159): Xaa is Y or H
  misc_feature (169)..(169): Xaa is H or R
  misc_feature (171)..(171): Xaa is Y or H
  misc_feature (178)..(178): Xaa is M or T
  misc_feature (185)..(185): Xaa is P or A
  misc_feature (219)..(219): Xaa is R, W, or Q
  misc_feature (258)..(258): Xaa is T or M
  misc_feature (275)..(275): Xaa is K or E

SEQ ID NO: 41 - protein, 275 aa, Homo sapiens
GSHSMRYFFTSVSRPGRGEPRFIAVGYVDDTQFVRFDSDAASQKMEPRAPWIEQEGPEYWDQETRNMKAHSQTDRANLGTLRGYYNQSEDGSHTIQIMYGCDVGPDGRFLRGYRQDAYDGKDYIALNEDLRSWTAADMAAQITKRKWEAVHAAEQRRVYLEGRCVDGLRRYLENGKETLQRTDPPKTHMTHHPISDHEATLRCWALGFYPAEITLTWQRDGEDQTQDTELVETRPAGDGTFQKWAAVVVPSGEEQRYTCHVQHEGLPKPLTLRWE

SEQ ID NO: 42 - protein, 275 aa, Homo sapiens
GSHSMRYFYTSVSRPGRGEPRFISVGYVDDTQFVRFDSDAASPREEPRAPWIEQEGPEYWDRNTQIYKAQAQTDRESLRNLRGYYNQSEAGSHTLQSMYGCDVGPDGRLLRGHDQYAYDGKDYIALNEDLRSWTAADTAAQITQRKWEAAREAEQRRAYLEGECVEWLRRYLENGKDKLERADPPKTHVTHHPISDHEATLRCWALGFYPAEITLTWQRDGEDQTQDTELVETRPAGDRTFQKWAAVVVPSGEEQRYTCHVQHEGLPKPLTLRWE

SEQ ID NO: 43 - protein, 275 aa, Homo sapiens
CSHSMRYFDTAVSRPGRGEPRFISVGYVDDTQFVRFDSDAASPRGEPRAPWVEQEGPEYWDRETQNYKRQAQADRVSLRNLRGYYNQSEDGSHTLQRMYGCDLGPDGRLLRGYDQSAYDGKDYIALNEDLRSWTAADTAAQITQRKLEAARAAEQLRAYLEGTCVEWLRRYLENGKETLQRAEPPKTHVTHHPLSDHEATLRCWALGFYPAEITLTWQRDGEDQTQDTELVETRPAGDGTFQKWAAVVVPSGQEQRYTCHMQHEGLQEPLTLSWE

SEQ ID NO: 44 - protein, 276 aa, Homo sapiens [sequence omitted]

SEQ ID NO: 45 - protein, 274 aa, Mus musculus
GPHSLRYFVTAVSRPGLGEPRFIAVGYVDDTQFVRFDSDADNPRFEPRAPWMEQEGPEYWEEQTQRAKSDEQWFRVSLRTAQRYYNQSKGGSHTFQRMFGCDVGSDWRLLRGYQQFAYDGRDYIALNEDLKTWTAADTAALITRRKWEQAGDAEYYRAYLEGECVEWLRRYLELGNETLLRTDSPKAHVTYHPRSQVDVTLRCWALGFYPADITLTWQLNGEDLTQDMELVETRPAGDGTFQKWAAVVVPLGKEQNYTCHVHHKGLPEPLTLRW

SEQ ID NO: 46 - protein, 275 aa, Artificial sequence
  synthetic sequence
GSHSMRYFFTSVSRPGRGEPRFIAVGYVDDTQFVRFDSDAASQRMEPRAPWIEQEGPEYWDGETRKVKAHSQTHRVDLGTLRGAYNQSEAGSHTVQRMYGCDVGSDWRFLRGYHQYAYDGKDYIALKEDLRSWTAADMAAQTTKHKWEAAHVAEQLRAYLEGTCVEWLRRYLENGKETLQRTDAPKTHMTHHAVSDHEATLRCWALSFYPAEITLTWQRDGEDQTQDTELVETRPCGDGTFQKWAAVVVPSGQEQRYTCHVQHEGLPKPLTLRWE

SEQ ID NO: 47 - protein, 275 aa, Artificial sequence
  synthetic sequence
GSHSMRYFFTSVSRPGRGEPRFIAVGYVDDTQFVRFDSDAASQRMEPRAPWIEQEGPEYWDGETRKVKAHSQTHRVDLGTLRGCYNQSEAGSHTVQRMYGCDVGSDWRFLRGYHQYAYDGKDYIALKEDLRSWTAADMCAQTTKHKWEAAHVAEQLRAYLEGTCVEWLRRYLENGKETLQRTDAPKTHMTHHAVSDHEATLRCWALSFYPAEITLTWQRDGEDQTQDTELVETRPCGDGTFQKWAAVVVPSGQEQRYTCHVQHEGLPKPLTLRWE

SEQ ID NO: 48 - protein, 276 aa, Artificial sequence
  synthetic sequence
GSHSMRYFFTSVSRPGRGEPRFIAVGYVDDTQFVRFDSDAASQRMEPRAPWIEQEGPEYWDGETRKVKAHSQTHRVDLGTLRGAYNQSEAGSHTVQRMYGCDVGSDWRFLRGYHQYAYDGKDYIALKEDLRSWTAADMAAQTTKHKWEAAHVAEQLRAYLEGTCVEWLRRYLENGKETLQRTDAPKTHMTHHAVSDHEATLRCWALSFYPAEITLTWQRDGEDQTQDTELVETRPCGDGTFQKWAAVVVPSGQEQRYTCHVQHEGLPKPLTLRWEP

SEQ ID NO: 49 - protein, 276 aa, Homo sapiens
GSHSMRYFYTSVSRPGRGEPRFIAVGYVDDTQFVRFDSDAASQRMEPRAPWIEQEGPEYWDQETRNVKAQSQTDRVDLGTLRGYYNQSEDGSHTIQIMYGCDVGPDGRFLRGYRQDAYDGKDYIALNEDLRSWTAADMAAQITKRKWEAAHAAEQQRAYLEGRCVEWLRRYLENGKETLQRTDPPKTHMTHHPISDHEATLRCWALGFYPAEITLTWQRDGEDQTQDTELVETRPAGDGTFQKWAAVVVPSGEEQRYTCHVQHEGLPKPLTLRWEL

SEQ ID NO: 50 - protein, 276 aa, Homo sapiens
GSHSMRYFSTSVSRPGRGEPRFIAVGYVDDTQFVRFDSDAASQRMEPRAPWIEQEGPEYWDEETGKVKAHSQTDRENLRIALRYYNQSEAGSHTLQMMFGCDVGSDGRFLRGYHQYAYDGKDYIALKEDLRSWTAADMAAQITKRKWEAAHVAEQQRAYLEGTCVDGLRRYLENGKETLQRTDPPKTHMTHHPISDHEATLRCWALGFYPAEITLTWQRDGEDQTQDTELVETRPAGDGTFQKWAAVVVPSGEEQRYTCHVQHEGLPKPLTLRWEP

SEQ ID NO: 51 - protein, 276 aa, Homo sapiens
GSHSMRYFTTSVSRPGRGEPRFIAVGYVDDTQFVRFDSDAASQRMEPRAPWIEQEGPEYWDRNTRNVKAHSQIDRVDLGTLRGYYNQSEAGSHTIQMMYGCDVGSDGRFLRGYQQDAYDGKDYIALNEDLRSWTAADMAAQITQRKWEAARVAEQLRAYLEGTCVEWLRRYLENGKETLQRTDPPKTHMTHHAVSDHEATLRCWALSFYPAEITLTWQRDGEDQTQDTELVETRPAGDGTFQKWASVVVPSGQEQRYTCHVQHEGLPKPLTLRWEP

SEQ ID NO: 52 - protein, 219 aa, Artificial sequence
  synthetic sequence
  misc_feature (8)..(8): any amino acid other than aspartic acid
FTVTVPKXLYVVEYGSNMTIECKFPVEKQLDLAALIVYWEMEDKNIIQFVHGEEDLKVQHSSYRQRARLLKDQLSLGNAALQITDVKLQDAGVYRCMISYGGADYKRITVKVNAPYNKINQRILVVDPVTSEHELTCQAEGYPKAEVIWTSSDHQVLSGKTTTTNSKREEKLFNVTSTLRINTTTNEIFYCTFRRLDPEENHTAELVIPGNILNVSIKI

SEQ ID NO: 53 - protein, 219 aa, Artificial sequence
  synthetic sequence
  misc_feature (36)..(36): any amino acid other than isoleucine
FTVTVPKDLYVVEYGSNMTIECKFPVEKQLDLAALXVYWEMEDKNIIQFVHGEEDLKVQHSSYRQRARLLKDQLSLGNAALQITDVKLQDAGVYRCMISYGGADYKRITVKVNAPYNKINQRILVVDPVTSEHELTCQAEGYPKAEVIWTSSDHQVLSGKTTTTNSKREEKLFNVTSTLRINTTTNEIFYCTFRRLDPEENHTAELVIPGNILNVSIKI

SEQ ID NO: 54 - protein, 219 aa, Artificial sequence
  synthetic sequence
  misc_feature (54)..(54): any amino acid other than glutamine
FTVTVPKDLYVVEYGSNMTIECKFPVEKQLDLAALIVYWEMEDKNIIQFVHGEXDLKVQHSSYRQRARLLKDQLSLGNAALQITDVKLQDAGVYRCMISYGGADYKRITVKVNAPYNKINQRILVVDPVTSEHELTCQAEGYPKAEVIWTSSDHQVLSGKTTTTNSKREEKLFNVTSTLRINTTTNEIFYCTFRRLDPEENHTAELVIPGNILNVSIKI

SEQ ID NO: 55 - protein, 208 aa, Artificial sequence
  synthetic sequence
  misc_feature (19)..(19): any amino acid other than asparagine
VIHVTKEVKEVATLSCGHXVSVEELAQTRIYWQKEKKMVLTMMSGDMNIWPEYKNRTIFDITNNLSIVILALRPSDEGTYECVVLKYEKDAFKREHLAEVTLSVKADFPTPSISDFEIPTSNIRRIICSTSGGFPEPHLSWLENGEELNAINTTVSQDPETELYAVSSKLDFNMTTNHSFMCLIKYGHLRVNQTFNWNTTKQEHFPDN

SEQ ID NO: 56 - protein, 208 aa, Artificial sequence
  synthetic sequence
  misc_feature (63)..(63): any amino acid other than asparagine
VIHVTKEVKEVATLSCGHNVSVEELAQTRIYWQKEKKMVLTMMSGDMNIWPEYKNRTIFDITXNLSIVILALRPSDEGTYECVVLKYEKDAFKREHLAEVTLSVKADFPTPSISDFEIPTSNIRRIICSTSGGFPEPHLSWLENGEELNAINTTVSQDPETELYAVSSKLDFNMTTNHSFMCLIKYGHLRVNQTFNWNTTKQEHFPDN

SEQ ID NO: 57 - protein, 208 aa, Artificial sequence
  synthetic sequence
  misc_feature (67)..(67): any amino acid other than isoleucine
VIHVTKEVKEVATLSCGHNVSVEELAQTRIYWQKEKKMVLTMMSGDMNIWPEYKNRTIFDITNNLSXVILALRPSDEGTYECVVLKYEKDAFKREHLAEVTLSVKADFPTPSISDFEIPTSNIRRIICSTSGGFPEPHLSWLENGEELNAINTTVSQDPETELYAVSSKLDFNMTTNHSFMCLIKYGHLRVNQTFNWNTTKQEHFPDN

SEQ ID NO: 58 - protein, 208 aa, Artificial sequence
  synthetic sequence
  misc_feature (86)..(86): any amino acid other than lysine
VIHVTKEVKEVATLSCGHNVSVEELAQTRIYWQKEKKMVLTMMSGDMNIWPEYKNRTIFDITNNLSIVILALRPSDEGTYECVVLXYEKDAFKREHLAEVTLSVKADFPTPSISDFEIPTSNIRRIICSTSGGFPEPHLSWLENGEELNAINTTVSQDPETELYAVSSKLDFNMTTNHSFMCLIKYGHLRVNQTFNWNTTKQEHFPDN

SEQ ID NO: 59 - protein, 5 aa, Artificial sequence
  synthetic sequence
  misc_feature (4)..(4): any amino acid other than proline
VPGXG

SEQ ID NO: 60 - protein, 208 aa, Artificial sequence
  synthetic sequence
  misc_feature (157)..(157): any amino acid other than glutamine
VIHVTKEVKEVATLSCGHNVSVEELAQTRIYWQKEKKMVLTMMSGDMNIWPEYKNRTIFDITNNLSIVILALRPSDEGTYECVVLKYEKDAFKREHLAEVTLSVKADFPTPSISDFEIPTSNIRRIICSTSGGFPEPHLSWLENGEELNAINTTVSXDPETELYAVSSKLDFNMTTNHSFMCLIKYGHLRVNQTFNWNTTKQEHFPDN

SEQ ID NO: 61 - protein, 208 aa, Artificial sequence
  synthetic sequence
  misc_feature (158)..(158): any amino acid other than aspartic acid
VIHVTKEVKEVATLSCGHNVSVEELAQTRIYWQKEKKMVLTMMSGDMNIWPEYKNRTIFDITNNLSIVILALRPSDEGTYECVVLKYEKDAFKREHLAEVTLSVKADFPTPSISDFEIPTSNIRRIICSTSGGFPEPHLSWLENGEELNAINTTVSQXPETELYAVSSKLDFNMTTNHSFMCLIKYGHLRVNQTFNWNTTKQEHFPDN

SEQ ID NO: 62 - protein, 208 aa, Artificial sequence
  synthetic sequence
  misc_feature (25)..(25): any amino acid other than leucine
VIHVTKEVKEVATLSCGHNVSVEEXAQTRIYWQKEKKMVLTMMSGDMNIWPEYKNRTIFDITNNLSIVILALRPSDEGTYECVVLKYEKDAFKREHLAEVTLSVKADFPTPSISDFEIPTSNIRRIICSTSGGFPEPHLSWLENGEELNAINTTVSQDPETELYAVSSKLDFNMTTNHSFMCLIKYGHLRVNQTFNWNTTKQEHFPDN

SEQ ID NO: 63 - protein, 208 aa, Artificial sequence
  synthetic sequence
  misc_feature (31)..(31): any amino acid other than tyrosine
VIHVTKEVKEVATLSCGHNVSVEELAQTRIXWQKEKKMVLTMMSGDMNIWPEYKNRTIFDITNNLSIVILALRPSDEGTYECVVLKYEKDAFKREHLAEVTLSVKADFPTPSISDFEIPTSNIRRIICSTSGGFPEPHLSWLENGEELNAINTTVSQDPETELYAVSSKLDFNMTTNHSFMCLIKYGHLRVNQTFNWNTTKQEHFPDN

SEQ ID NO: 64 - protein, 208 aa, Artificial sequence
  synthetic sequence
  misc_feature (33)..(33): any amino acid other than glutamine
VIHVTKEVKEVATLSCGHNVSVEELAQTRIYWXKEKKMVLTMMSGDMNIWPEYKNRTIFDITNNLSIVILALRPSDEGTYECVVLKYEKDAFKREHLAEVTLSVKADFPTPSISDFEIPTSNIRRIICSTSGGFPEPHLSWLENGEELNAINTTVSQDPETELYAVSSKLDFNMTTNHSFMCLIKYGHLRVNQTFNWNTTKQEHFPDN

SEQ ID NO: 65 - protein, 208 aa, Artificial sequence
  synthetic sequence
  misc_feature (38)..(38): any amino acid other than methionine
VIHVTKEVKEVATLSCGHNVSVEELAQTRIYWQKEKKXVLTMMSGDMNIWPEYKNRTIFDITNNLSIVILALRPSDEGTYECVVLKYEKDAFKREHLAEVTLSVKADFPTPSISDFEIPTSNIRRIICSTSGGFPEPHLSWLENGEELNAINTTVSQDPETELYAVSSKLDFNMTTNHSFMCLIKYGHLRVNQTFNWNTTKQEHFPDN

SEQ ID NO: 66 - protein, 208 aa, Artificial sequence
  synthetic sequence
  misc_feature (39)..(39): any amino acid other than valine
VIHVTKEVKEVATLSCGHNVSVEELAQTRIYWQKEKKMXLTMMSGDMNIWPEYKNRTIFDITNNLSIVILALRPSDEGTYECVVLKYEKDAFKREHLAEVTLSVKADFPTPSISDFEIPTSNIRRIICSTSGGFPEPHLSWLENGEELNAINTTVSQDPETELYAVSSKLDFNMTTNHSFMCLIKYGHLRVNQTFNWNTTKQEHFPDN

SEQ ID NO: 67 - protein, 208 aa, Artificial sequence
  synthetic sequence
  misc_feature (49)..(49): any amino acid other than isoleucine
VIHVTKEVKEVATLSCGHNVSVEELAQTRIYWQKEKKMVLTMMSGDMNXWPEYKNRTIFDITNNLSIVILALRPSDEGTYECVVLKYEKDAFKREHLAEVTLSVKADFPTPSISDFEIPTSNIRRIICSTSGGFPEPHLSWLENGEELNAINTTVSQDPETELYAVSSKLDFNMTTNHSFMCLIKYGHLRVNQTFNWNTTKQEHFPDN

SEQ ID NO: 68 - protein, 208 aa, Artificial sequence
  synthetic sequence
  misc_feature (53)..(53): any amino acid other than tyrosine
VIHVTKEVKEVATLSCGHNVSVEELAQTRIYWQKEKKMVLTMMSGDMNIWPEXKNRTIFDITNNLSIVILALRPSDEGTYECVVLKYEKDAFKREHLAEVTLSVKADFPTPSISDFEIPTSNIRRIICSTSGGFPEPHLSWLENGEELNAINTTVSQDPETELYAVSSKLDFNMTTNHSFMCLIKYGHLRVNQTFNWNTTKQEHFPDN

SEQ ID NO: 69 - protein, 208 aa, Artificial sequence
  synthetic sequence
  misc_feature (60)..(60): any amino acid other than aspartic acid
VIHVTKEVKEVATLSCGHNVSVEELAQTRIYWQKEKKMVLTMMSGDMNIWPEYKNRTIFXITNNLSIVILALRPSDEGTYECVVLKYEKDAFKREHLAEVTLSVKADFPTPSISDFEIPTSNIRRIICSTSGGFPEPHLSWLENGEELNAINTTVSQDPETELYAVSSKLDFNMTTNHSFMCLIKYGHLRVNQTFNWNTTKQEHFPDN

SEQ ID NO: 70 - protein, 208 aa, Artificial sequence
  synthetic sequence
  misc_feature (108)..(108): any amino acid other than phenylalanine
VIHVTKEVKEVATLSCGHNVSVEELAQTRIYWQKEKKMVLTMMSGDMNIWPEYKNRTIFDITNNLSIVILALRPSDEGTYECVVLKYEKDAFKREHLAEVTLSVKADXPTPSISDFEIPTSNIRRIICSTSGGFPEPHLSWLENGEELNAINTTVSQDPETELYAVSSKLDFNMTTNHSFMCLIKYGHLRVNQTFNWNTTKQEHFPDN

SEQ ID NO: 71 - protein, 208 aa, Artificial sequence
  synthetic sequence
  misc_feature (156)..(156): any amino acid other than serine
VIHVTKEVKEVATLSCGHNVSVEELAQTRIYWQKEKKMVLTMMSGDMNIWPEYKNRTIFDITNNLSIVILALRPSDEGTYECVVLKYEKDAFKREHLAEVTLSVKADFPTPSISDFEIPTSNIRRIICSTSGGFPEPHLSWLENGEELNAINTTVXQDPETELYAVSSKLDFNMTTNHSFMCLIKYGHLRVNQTFNWNTTKQEHFPDN

SEQ ID NO: 72 - protein, 208 aa, Artificial sequence
  synthetic sequence
  misc_feature (111)..(111): any amino acid other than proline
VIHVTKEVKEVATLSCGHNVSVEELAQTRIYWQKEKKMVLTMMSGDMNIWPEYKNRTIFDITNNLSIVILALRPSDEGTYECVVLKYEKDAFKREHLAEVTLSVKADFPTXSISDFEIPTSNIRRIICSTSGGFPEPHLSWLENGEELNAINTTVSQDPETELYAVSSKLDFNMTTNHSFMCLIKYGHLRVNQTFNWNTTKQEHFPDN

SEQ ID NO: 73 - protein, 224 aa, Artificial sequence
  synthetic sequence
  misc_feature (61)..(61): any amino acid other than asparagine
APLKIQAYFNETADLPCQFANSQNQSLSELVVFWQDQENLVLNEVYLGKEKFDSVHSKYMXRTSFDSDSWTLRLHNLQIKDKGLYQCIIHHKKPTGMIRIHQMNSELSVLANFSQPEIVPISNITENVYINLTCSSIHGYPEPKKMSVLLRTKNSTIEYDGIMQKSQDNVTELYDVSISLSVSFPDVTSNMTIFCILETDKTRLLSSPFSIELEDPQPPPDHIP

SEQ ID NO: 74 - protein, 224 aa, Artificial sequence
  synthetic sequence
  misc_feature (66)..(66): any amino acid other than aspartic acid
APLKIQAYFNETADLPCQFANSQNQSLSELVVFWQDQENLVLNEVYLGKEKFDSVHSKYMNRTSFXSDSWTLRLHNLQIKDKGLYQCIIHHKKPTGMIRIHQMNSELSVLANFSQPEIVPISNITENVYINLTCSSIHGYPEPKKMSVLLRTKNSTIEYDGIMQKSQDNVTELYDVSISLSVSFPDVTSNMTIFCILETDKTRLLSSPFSIELEDPQPPPDHIP

SEQ ID NO: 75 - protein, 224 aa, Artificial sequence
  synthetic sequence
  misc_feature (70)..(70): any amino acid other than tryptophan
APLKIQAYFNETADLPCQFANSQNQSLSELVVFWQDQENLVLNEVYLGKEKFDSVHSKYMNRTSFDSDSXTLRLHNLQIKDKGLYQCIIHHKKPTGMIRIHQMNSELSVLANFSQPEIVPISNITENVYINLTCSSIHGYPEPKKMSVLLRTKNSTIEYDGIMQKSQDNVTELYDVSISLSVSFPDVTSNMTIFCILETDKTRLLSSPFSIELEDPQPPPDHIP

SEQ ID NO: 76 - protein, 224 aa, Artificial sequence
  synthetic sequence
  misc_feature (91)..(91): any amino acid other than histidine
APLKIQAYFNETADLPCQFANSQNQSLSELVVFWQDQENLVLNEVYLGKEKFDSVHSKYMNRTSFDSDSWTLRLHNLQIKDKGLYQCIIHXKKPTGMIRIHQMNSELSVLANFSQPEIVPISNITENVYINLTCSSIHGYPEPKKMSVLLRTKNSTIEYDGIMQKSQDNVTELYDVSISLSVSFPDVTSNMTIFCILETDKTRLLSSPFSIELEDPQPPPDHIP

SEQ ID NO: 77 - protein, 110 aa, Artificial sequence
  synthetic sequence
  misc_feature (61)..(61): any amino acid other than asparagine
APLKIQAYFNETADLPCQFANSQNQSLSELVVFWQDQENLVLNEVYLGKEKFDSVHSKYMXRTSFDSDSWTLRLHNLQIKDKGLYQCIIHHKKPTGMIRIHQMNSELSVL

SEQ ID NO: 78 - protein, 110 aa, Artificial sequence
  synthetic sequence
  misc_feature (66)..(66): any amino acid other than aspartic acid
APLKIQAYFNETADLPCQFANSQNQSLSELVVFWQDQENLVLNEVYLGKEKFDSVHSKYMNRTSFXSDSWTLRLHNLQIKDKGLYQCIIHHKKPTGMIRIHQMNSELSVL

SEQ ID NO: 79 - protein, 110 aa, Artificial sequence
  synthetic sequence
  misc_feature (70)..(70): any amino acid other than tryptophan
APLKIQAYFNETADLPCQFANSQNQSLSELVVFWQDQENLVLNEVYLGKEKFDSVHSKYMNRTSFDSDSXTLRLHNLQIKDKGLYQCIIHHKKPTGMIRIHQMNSELSVL

SEQ ID NO: 80 - protein, 110 aa, Artificial sequence
  synthetic sequence
  misc_feature (91)..(91): any amino acid other than histidine
APLKIQAYFNETADLPCQFANSQNQSLSELVVFWQDQENLVLNEVYLGKEKFDSVHSKYMNRTSFDSDSWTLRLHNLQIKDKGLYQCIIHXKKPTGMIRIHQMNSELSVL

SEQ ID NO: 81 - protein, 224 aa, Artificial sequence
  synthetic sequence
  misc_feature (41)..(41): any amino acid other than valine
APLKIQAYFNETADLPCQFANSQNQSLSELVVFWQDQENLXLNEVYLGKEKFDSVHSKYMNRTSFDSDSWTLRLHNLQIKDKGLYQCIIHHKKPTGMIRIHQMNSELSVLANFSQPEIVPISNITENVYINLTCSSIHGYPEPKKMSVLLRTKNSTIEYDGIMQKSQDNVTELYDVSISLSVSFPDVTSNMTIFCILETDKTRLLSSPFSIELEDPQPPPDHIP

SEQ ID NO: 82 - protein, 110 aa, Artificial sequence
  synthetic sequence
  misc_feature (41)..(41): any amino acid other than valine
APLKIQAYFNETADLPCQFANSQNQSLSELVVFWQDQENLXLNEVYLGKEKFDSVHSKYMNRTSFDSDSWTLRLHNLQIKDKGLYQCIIHHKKPTGMIRIHQMNSELSVL

SEQ ID NO: 83 - protein, 224 aa, Artificial sequence
  synthetic sequence
  misc_feature (35)..(35): any amino acid other than glutamine
APLKIQAYFNETADLPCQFANSQNQSLSELVVFWXDQENLVLNEVYLGKEKFDSVHSKYMNRTSFDSDSWTLRLHNLQIKDKGLYQCIIHHKKPTGMIRIHQMNSELSVLANFSQPEIVPISNITENVYINLTCSSIHGYPEPKKMSVLLRTKNSTIEYDGIMQKSQDNVTELYDVSISLSVSFPDVTSNMTIFCILETDKTRLLSSPFSIELEDPQPPPDHIP

SEQ ID NO: 84 - protein, 110 aa, Artificial sequence
  synthetic sequence
  misc_feature (35)..(35): any amino acid other than glutamine
APLKIQAYFNETADLPCQFANSQNQSLSELVVFWXDQENLVLNEVYLGKEKFDSVHSKYMNRTSFDSDSWTLRLHNLQIKDKGLYQCIIHHKKPTGMIRIHQMNSELSVL

SEQ ID NO: 85 - protein, 224 aa, Artificial sequence
  synthetic sequence
  misc_feature (33)..(33): any amino acid other than phenylalanine
APLKIQAYFNETADLPCQFANSQNQSLSELVVXWQDQENLVLNEVYLGKEKFDSVHSKYMNRTSFDSDSWTLRLHNLQIKDKGLYQCIIHHKKPTGMIRIHQMNSELSVLANFSQPEIVPISNITENVYINLTCSSIHGYPEPKKMSVLLRTKNSTIEYDGIMQKSQDNVTELYDVSISLSVSFPDVTSNMTIFCILETDKTRLLSSPFSIELEDPQPPPDHIP

SEQ ID NO: 86 - protein, 110 aa, Artificial sequence
  synthetic sequence
  misc_feature (33)..(33): any amino acid other than phenylalanine
APLKIQAYFNETADLPCQFANSQNQSLSELVVXWQDQENLVLNEVYLGKEKFDSVHSKYMNRTSFDSDSWTLRLHNLQIKDKGLYQCIIHHKKPTGMIRIHQMNSELSVL

SEQ ID NO: 87 - protein, 224 aa, Artificial sequence
  synthetic sequence
  misc_feature (72)..(72): any amino acid other than leucine
APLKIQAYFNETADLPCQFANSQNQSLSELVVFWQDQENLVLNEVYLGKEKFDSVHSKYMNRTSFDSDSWTXRLHNLQIKDKGLYQCIIHHKKPTGMIRIHQMNSELSVLANFSQPEIVPISNITENVYINLTCSSIHGYPEPKKMSVLLRTKNSTIEYDGIMQKSQDNVTELYDVSISLSVSFPDVTSNMTIFCILETDKTRLLSSPFSIELEDPQPPPDHIP

SEQ ID NO: 88 - protein, 110 aa, Artificial sequence
  synthetic sequence
  misc_feature (72)..(72): any amino acid other than leucine
APLKIQAYFNETADLPCQFANSQNQSLSELVVFWQDQENLVLNEVYLGKEKFDSVHSKYMNRTSFDSDSWTXRLHNLQIKDKGLYQCIIHHKKPTGMIRIHQMNSELSVL

SEQ ID NO: 89 - protein, 224 aa, Artificial sequence
  synthetic sequence
  misc_feature (59)..(59): any amino acid other than tyrosine
APLKIQAYFNETADLPCQFANSQNQSLSELVVFWQDQENLVLNEVYLGKEKFDSVHSKXMNRTSFDSDSWTLRLHNLQIKDKGLYQCIIHHKKPTGMIRIHQMNSELSVLANFSQPEIVPISNITENVYINLTCSSIHGYPEPKKMSVLLRTKNSTIEYDGIMQKSQDNVTELYDVSISLSVSFPDVTSNMTIFCILETDKTRLLSSPFSIELEDPQPPPDHIP

SEQ ID NO: 90 - protein, 110 aa, Artificial sequence
  synthetic sequence
  misc_feature (59)..(59): any amino acid other than tyrosine
APLKIQAYFNETADLPCQFANSQNQSLSELVVFWQDQENLVLNEVYLGKEKFDSVHSKXMNRTSFDSDSWTLRLHNLQIKDKGLYQCIIHHKKPTGMIRIHQMNSELSVL

SEQ ID NO: 91 - protein, 224 aa, Artificial sequence
  synthetic sequence
  misc_feature (61)..(61): any amino acid other than asparagine
  misc_feature (91)..(91): any amino acid other than histidine
APLKIQAYFNETADLPCQFANSQNQSLSELVVFWQDQENLVLNEVYLGKEKFDSVHSKYMXRTSFDSDSWTLRLHNLQIKDKGLYQCIIHXKKPTGMIRIHQMNSELSVLANFSQPEIVPISNITENVYINLTCSSIHGYPEPKKMSVLLRTKNSTIEYDGIMQKSQDNVTELYDVSISLSVSFPDVTSNMTIFCILETDKTRLLSSPFSIELEDPQPPPDHIP

SEQ ID NO: 92 - protein, 110 aa, Artificial sequence
  synthetic sequence
  misc_feature (61)..(61): any amino acid other than asparagine
  misc_feature (91)..(91): any amino acid other than histidine
APLKIQAYFNETADLPCQFANSQNQSLSELVVFWQDQENLVLNEVYLGKEKFDSVHSKYMXRTSFDSDSWTLRLHNLQIKDKGLYQCIIHXKKPTGMIRIHQMNSELSVL

SEQ ID NO: 93 - protein, 224 aa, Artificial sequence
  synthetic sequence
  misc_feature (66)..(66): any amino acid other than aspartic acid
  misc_feature (91)..(91): any amino acid other than histidine
APLKIQAYFNETADLPCQFANSQNQSLSELVVFWQDQENLVLNEVYLGKEKFDSVHSKYMNRTSFXSDSWTLRLHNLQIKDKGLYQCIIHXKKPTGMIRIHQMNSELSVLANFSQPEIVPISNITENVYINLTCSSIHGYPEPKKMSVLLRTKNSTIEYDGIMQKSQDNVTELYDVSISLSVSFPDVTSNMTIFCILETDKTRLLSSPFSIELEDPQPPPDHIP

SEQ ID NO: 94 - protein, 110 aa, Artificial sequence
  synthetic sequence
  misc_feature (66)..(66): any amino acid other than asparagine
  misc_feature (91)..(91): Xaa can be any amino acid other than His
APLKIQAYFNETADLPCQFANSQNQSLSELVVFWQDQENLVLNEVYLGKEKFDSVHSKYMNRTSFXSDSWTLRLHNLQIKDKGLYQCIIHXKKPTGMIRIHQMNSELSVL

SEQ ID NO: 95 - protein, 224 aa, Artificial sequence
  synthetic sequence
  Misc_feature (61)..(61): any amino acid other than asparagine
  Misc_feature (66)..(66): any amino acid other than aspartic acid
  Misc_feature (91)..(91): any amino acid other than histidine
APLKIQAYFNETADLPCQFANSQNQSLSELVVFWQDQENLVLNEVYLGKEKFDSVHSKYMXRTSFXSDSWTLRLHNLQIKDKGLYQCIIHXKKPTGMIRIHQMNSELSVLANFSQPEIVPISNITENVYINLTCSSIHGYPEPKKMSVLLRTKNSTIEYDGIMQKSQDNVTELYDVSISLSVSFPDVTSNMTIFCILETDKTRLLSSPFSIELEDPQPPPDHIP

SEQ ID NO: 96 - protein, 110 aa, Artificial sequence
  synthetic sequence
  Misc_feature (61)..(61): any amino acid other than asparagine
  Misc_feature (66)..(66): any amino acid other than aspartic acid
  Misc_feature (91)..(91): any amino acid other than histidine
APLKIQAYFNETADLPCQFANSQNQSLSELVVFWQDQENLVLNEVYLGKEKFDSVHSKYMXRTSFXSDSWTLRLHNLQIKDKGLYQCIIHXKKPTGMIRIHQMNSELSVL

SEQ ID NO: 97 - protein, 174 aa, Artificial sequence
  synthetic sequence
  misc_feature (47)..(47): any amino acid other than lysine
PAGLLDLRQGMFAQLVAQNVLLIDGPLSWYSDPGLAGVSLTGGLSYXEDTKELVVAKAGVYYVFFQLELRRVVAGEGSGSVSLALHLQPLRSAAGAAALALTVDLPPASSEARNSAFGFQGRLLHLSAGQRLGVHLHTEARARHAWQLTQGATVLGLFRVTPEIPAGLPSPRSE

SEQ ID NO: 98 - protein, 174 aa, Artificial sequence
  synthetic sequence
  misc_feature (147)..(147): any amino acid other than glutamine
PAGLLDLRQGMFAQLVAQNVLLIDGPLSWYSDPGLAGVSLTGGLSYKEDTKELVVAKAGVYYVFFQLELRRVVAGEGSGSVSLALHLQPLRSAAGAAALALTVDLPPASSEARNSAFGFQGRLLHLSAGQRLGVHLHTEARARHAWXLTQGATVLGLFRVTPEIPAGLPSPRSE

SEQ ID NO: 99 - protein, 174 aa, Artificial sequence
  synthetic sequence
  misc_feature (11)..(11): any amino acid other than methionine
PAGLLDLRQGXFAQLVAQNVLLIDGPLSWYSDPGLAGVSLTGGLSYKEDTKELVVAKAGVYYVFFQLELRRVVAGEGSGSVSLALHLQPLRSAAGAAALALTVDLPPASSEARNSAFGFQGRLLHLSAGQRLGVHLHTEARARHAWQLTQGATVLGLFRVTPEIPAGLPSPRSE

SEQ ID NO: 100 - protein, 174 aa, Artificial sequence
  synthetic sequence
  misc_feature (12)..(12): any amino acid other than phenylalanine
PAGLLDLRQGMXAQLVAQNVLLIDGPLSWYSDPGLAGVSLTGGLSYKEDTKELVVAKAGVYYVFFQLELRRVVAGEGSGSVSLALHLQPLRSAAGAAALALTVDLPPASSEARNSAFGFQGRLLHLSAGQRLGVHLHTEARARHAWQLTQGATVLGLFRVTPEIPAGLPSPRSE

SEQ ID NO: 101 - protein, 174 aa, Artificial sequence
  synthetic sequence
  misc_feature (14)..(14): any amino acid other than glutamine
PAGLLDLRQGMFAXLVAQNVLLIDGPLSWYSDPGLAGVSLTGGLSYKEDTKELVVAKAGVYYVFFQLELRRVVAGEGSGSVSLALHLQPLRSAAGAAALALTVDLPPASSEARNSAFGFQGRLLHLSAGQRLGVHLHTEARARHAWQLTQGATVLGLFRVTPEIPAGLPSPRSE

SEQ ID NO: 102 - protein, 174 aa, Artificial sequence
  synthetic sequence
  misc_feature (15)..(15): any amino acid other than leucine
PAGLLDLRQGMFAQXVAQNVLLIDGPLSWYSDPGLAGVSLTGGLSYKEDTKELVVAKAGVYYVFFQLELRRVVAGEGSGSVSLALHLQPLRSAAGAAALALTVDLPPASSEARNSAFGFQGRLLHLSAGQRLGVHLHTEARARHAWQLTQGATVLGLFRVTPEIPAGLPSPRSE

SEQ ID NO: 103 - protein, 174 aa, Artificial sequence
  synthetic sequence
  misc_feature (16)..(16): any amino acid other than valine
PAGLLDLRQGMFAQLXAQNVLLIDGPLSWYSDPGLAGVSLTGGLSYKEDTKELVVAKAGVYYVFFQLELRRVVAGEGSGSVSLALHLQPLRSAAGAAALALTVDLPPASSEARNSAFGFQGRLLHLSAGQRLGVHLHTEARARHAWQLTQGATVLGLFRVTPEIPAGLPSPRSE

SEQ ID NO: 104 - protein, 174 aa, Artificial sequence
  synthetic sequence
  misc_feature (18)..(18): any amino acid other than glutamine
PAGLLDLRQGMFAQLVAXNVLLIDGPLSWYSDPGLAGVSLTGGLSYKEDTKELVVAKAGVYYVFFQLELRRVVAGEGSGSVSLALHLQPLRSAAGAAALALTVDLPPASSEARNSAFGFQGRLLHLSAGQRLGVHLHTEARARHAWQLTQGATVLGLFRVTPEIPAGLPSPRSE

SEQ ID NO: 105 - protein, 174 aa, Artificial sequence
  synthetic sequence
  misc_feature (19)..(19): any amino acid other than asparagined
PAGLLDLRQGMFAQLVAQXVLLIDGPLSWYSDPGLAGVSLTGGLSYKEDTKELVVAKAGVYYVFFQLELRRVVAGEGSGSVSLALHLQPLRSAAGAAALALTVDLPPASSEARNSAFGFQGRLLHLSAGQRLGVHLHTEARARHAWQLTQGATVLGLFRVTPEIPAGLPSPRSE

SEQ ID NO: 106 - protein, 174 aa, Artificial sequence
  synthetic sequence
  misc_feature (20)..(20): any amino acid other than valine
PAGLLDLRQGMFAQLVAQNXLLIDGPLSWYSDPGLAGVSLTGGLSYKEDTKELVVAKAGVYYVFFQLELRRVVAGEGSGSVSLALHLQPLRSAAGAAALALTVDLPPASSEARNSAFGFQGRLLHLSAGQRLGVHLHTEARARHAWQLTQGATVLGLFRVTPEIPAGLPSPRSE

SEQ ID NO: 107 - protein, 174 aa, Artificial sequence
  synthetic sequence
  misc_feature (21)..(21): any amino acid other than leucine
PAGLLDLRQGMFAQLVAQNVXLIDGPLSWYSDPGLAGVSLTGGLSYKEDTKELVVAKAGVYYVFFQLELRRVVAGEGSGSVSLALHLQPLRSAAGAAALALTVDLPPASSEARNSAFGFQGRLLHLSAGQRLGVHLHTEARARHAWQLTQGATVLGLFRVTPEIPAGLPSPRSE

SEQ ID NO: 108 - protein, 174 aa, Artificial sequence
  synthetic sequence
  misc_feature (22)..(22): any amino acid other than leucine
PAGLLDLRQGMFAQLVAQNVLXIDGPLSWYSDPGLAGVSLTGGLSYKEDTKELVVAKAGVYYVFFQLELRRVVAGEGSGSVSLALHLQPLRSAAGAAALALTVDLPPASSEARNSAFGFQGRLLHLSAGQRLGVHLHTEARARHAWQLTQGATVLGLFRVTPEIPAGLPSPRSE

SEQ ID NO: 109 - protein, 174 aa, Artificial sequence
  synthetic sequence
  misc_feature (23)..(23): any amino acid other than isoleucine
PAGLLDLRQGMFAQLVAQNVLLXDGPLSWYSDPGLAGVSLTGGLSYKEDTKELVVAKAGVYYVFFQLELRRVVAGEGSGSVSLALHLQPLRSAAGAAALALTVDLPPASSEARNSAFGFQGRLLHLSAGQRLGVHLHTEARARHAWQLTQGATVLGLFRVTPEIPAGLPSPRSE

SEQ ID NO: 110 - protein, 174 aa, Artificial sequence
  synthetic sequence
  misc_feature (24)..(24): any amino acid other than aspartic acid
PAGLLDLRQGMFAQLVAQNVLLIXGPLSWYSDPGLAGVSLTGGLSYKEDTKELVVAKAGVYYVFFQLELRRVVAGEGSGSVSLALHLQPLRSAAGAAALALTVDLPPASSEARNSAFGFQGRLLHLSAGQRLGVHLHTEARARHAWQLTQGATVLGLFRVTPEIPAGLPSPRSE

SEQ ID NO: 111 - protein, 174 aa, Artificial sequence
  synthetic sequence
  misc_feature (25)..(25): any amino acid other than glycine
PAGLLDLRQGMFAQLVAQNVLLIDXPLSWYSDPGLAGVSLTGGLSYKEDTKELVVAKAGVYYVFFQLELRRVVAGEGSGSVSLALHLQPLRSAAGAAALALTVDLPPASSEARNSAFGFQGRLLHLSAGQRLGVHLHTEARARHAWQLTQGATVLGLFRVTPEIPAGLPSPRSE

SEQ ID NO: 112 - protein, 174 aa, Artificial sequence
  synthetic sequence
  misc_feature (26)..(26): any amino acid other than proline
PAGLLDLRQGMFAQLVAQNVLLIGGXLSWYSDPGLAGVSLTGGLSYKEDTKELVVAKAGVYYVFFQLELRRVVAGEGSGSVSLALHLQPLRSAAGAAALALTVDLPPASSEARNSAFGFQGRLLHLSAGQRLGVHLHTEARARHAWQLTQGATVLGLFRVTPEIPAGLPSPRSE

SEQ ID NO: 113 - protein, 174 aa, Artificial sequence
  synthetic sequence
  misc_feature (27)..(27): any amino acid other than leucine
PAGLLDLRQGMFAQLVAQNVLLIGGPXSWYSDPGLAGVSLTGGLSYKEDTKELVVAKAGVYYVFFQLELRRVVAGEGSGSVSLALHLQPLRSAAGAAALALTVDLPPASSEARNSAFGFQGRLLHLSAGQRLGVHLHTEARARHAWQLTQGATVLGLFRVTPEIPAGLPSPRSE

SEQ ID NO: 114 - protein, 174 aa, Artificial sequence
  synthetic sequence
  misc_feature (28)..(28): any amino acid other than serine
PAGLLDLRQGMFAQLVAQNVLLIGGPLXWYSDPGLAGVSLTGGLSYKEDTKELVVAKAGVYYVFFQLELRRVVAGEGSGSVSLALHLQPLRSAAGAAALALTVDLPPASSEARNSAFGFQGRLLHLSAGQRLGVHLHTEARARHAWQLTQGATVLGLFRVTPEIPAGLPSPRSE

SEQ ID NO: 115 - protein, 174 aa, Artificial sequence
  synthetic sequence
  misc_feature (29)..(29): any amino acid other than tryptophan
PAGLLDLRQGMFAQLVAQNVLLIGGPLSXYSDPGLAGVSLTGGLSYKEDTKELVVAKAGVYYVFFQLELRRVVAGEGSGSVSLALHLQPLRSAAGAAALALTVDLPPASSEARNSAFGFQGRLLHLSAGQRLGVHLHTEARARHAWQLTQGATVLGLFRVTPEIPAGLPSPRSE

SEQ ID NO: 116 - protein, 174 aa, Artificial sequence
  synthetic sequence
  misc_feature (30)..(30): any amino acid other than tyrosine
PAGLLDLRQGMFAQLVAQNVLLIGGPLSWXSDPGLAGVSLTGGLSYKEDTKELVVAKAGVYYVFFQLELRRVVAGEGSGSVSLALHLQPLRSAAGAAALALTVDLPPASSEARNSAFGFQGRLLHLSAGQRLGVHLHTEARARHAWQLTQGATVLGLFRVTPEIPAGLPSPRSE

SEQ ID NO: 117 - protein, 174 aa, Artificial sequence
  synthetic sequence
  misc_feature (31)..(31): any amino acid other than serine
PAGLLDLRQGMFAQLVAQNVLLIGGPLSWYXDPGLAGVSLTGGLSYKEDTKELVVAKAGVYYVFFQLELRRVVAGEGSGSVSLALHLQPLRSAAGAAALALTVDLPPASSEARNSAFGFQGRLLHLSAGQRLGVHLHTEARARHAWQLTQGATVLGLFRVTPEIPAGLPSPRSE

SEQ ID NO: 118 - protein, 174 aa, Artificial sequence
  synthetic sequence
  misc_feature (32)..(32): any amino acid other than aspartic acid
PAGLLDLRQGMFAQLVAQNVLLIGGPLSWYSXPGLAGVSLTGGLSYKEDTKELVVAKAGVYYVFFQLELRRVVAGEGSGSVSLALHLQPLRSAAGAAALALTVDLPPASSEARNSAFGFQGRLLHLSAGQRLGVHLHTEARARHAWQLTQGATVLGLFRVTPEIPAGLPSPRSE

SEQ ID NO: 119 - protein, 174 aa, Artificial sequence
  synthetic sequence
  misc_feature (33)..(33): any amino acid other than proline
PAGLLDLRQGMFAQLVAQNVLLIGGPLSWYSDXGLAGVSLTGGLSYKEDTKELVVAKAGVYYVFFQLELRRVVAGEGSGSVSLALHLQPLRSAAGAAALALTVDLPPASSEARNSAFGFQGRLLHLSAGQRLGVHLHTEARARHAWQLTQGATVLGLFRVTPEIPAGLPSPRSE

SEQ ID NO: 120 - protein, 174 aa, Artificial sequence
  synthetic sequence
  misc_feature (34)..(34): any amino acid other than glycine
PAGLLDLRQGMFAQLVAQNVLLIGGPLSWYSDPXLAGVSLTGGLSYKEDTKELVVAKAGVYYVFFQLELRRVVAGEGSGSVSLALHLQPLRSAAGAAALALTVDLPPASSEARNSAFGFQGRLLHLSAGQRLGVHLHTEARARHAWQLTQGATVLGLFRVTPEIPAGLPSPRSE

SEQ ID NO: 121 - protein, 174 aa, Artificial sequence
  synthetic sequence
  misc_feature (35)..(35): any amino acid other than leucine
PAGLLDLRQGMFAQLVAQNVLLIGGPLSWYSDPGXAGVSLTGGLSYKEDTKELVVAKAGVYYVFFQLELRRVVAGEGSGSVSLALHLQPLRSAAGAAALALTVDLPPASSEARNSAFGFQGRLLHLSAGQRLGVHLHTEARARHAWQLTQGATVLGLFRVTPEIPAGLPSPRSE

SEQ ID NO: 122 - protein, 174 aa, Artificial sequence
  synthetic sequence
  misc_feature (37)..(37): any amino acid other than glycine
PAGLLDLRQGMFAQLVAQNVLLIGGPLSWYSDPGLAXVSLTGGLSYKEDTKELVVAKAGVYYVFFQLELRRVVAGEGSGSVSLALHLQPLRSAAGAAALALTVDLPPASSEARNSAFGFQGRLLHLSAGQRLGVHLHTEARARHAWQLTQGATVLGLFRVTPEIPAGLPSPRSE

SEQ ID NO: 123 - protein, 174 aa, Artificial sequence
  synthetic sequence
  misc_feature (38)..(38): any amino acid other than valine
PAGLLDLRQGMFAQLVAQNVLLIGGPLSWYSDPGLAGXSLTGGLSYKEDTKELVVAKAGVYYVFFQLELRRVVAGEGSGSVSLALHLQPLRSAAGAAALALTVDLPPASSEARNSAFGFQGRLLHLSAGQRLGVHLHTEARARHAWQLTQGATVLGLFRVTPEIPAGLPSPRSE

SEQ ID NO: 124 - protein, 174 aa, Artificial sequence
  synthetic sequence
  misc_feature (39)..(39): any amino acid other than serine
PAGLLDLRQGMFAQLVAQNVLLIGGPLSWYSDPGLAGVXLTGGLSYKEDTKELVVAKAGVYYVFFQLELRRVVAGEGSGSVSLALHLQPLRSAAGAAALALTVDLPPASSEARNSAFGFQGRLLHLSAGQRLGVHLHTEARARHAWQLTQGATVLGLFRVTPEIPAGLPSPRSE

SEQ ID NO: 125 - protein, 174 aa, Artificial sequence
  synthetic sequence
  misc_feature (40)..(40): any amino acid other than leucine
PAGLLDLRQGMFAQLVAQNVLLIGGPLSWYSDPGLAGVSXTGGLSYKEDTKELVVAKAGVYYVFFQLELRRVVAGEGSGSVSLALHLQPLRSAAGAAALALTVDLPPASSEARNSAFGFQGRLLHLSAGQRLGVHLHTEARARHAWQLTQGATVLGLFRVTPEIPAGLPSPRSE

SEQ ID NO: 126 - protein, 174 aa, Artificial sequence
  synthetic sequence
  misc_feature (41)..(41): any amino acid other than threonine
PAGLLDLRQGMFAQLVAQNVLLIGGPLSWYSDPGLAGVSLXGGLSYKEDTKELVVAKAGVYYVFFQLELRRVVAGEGSGSVSLALHLQPLRSAAGAAALALTVDLPPASSEARNSAFGFQGRLLHLSAGQRLGVHLHTEARARHAWQLTQGATVLGLFRVTPEIPAGLPSPRSE

SEQ ID NO: 127 - protein, 174 aa, Artificial sequence
  synthetic sequence
  misc_feature (42)..(42): any amino acid other than glycine
PAGLLDLRQGMFAQLVAQNVLLIGGPLSWYSDPGLAGVSLTXGLSYKEDTKELVVAKAGVYYVFFQLELRRVVAGEGSGSVSLALHLQPLRSAAGAAALALTVDLPPASSEARNSAFGFQGRLLHLSAGQRLGVHLHTEARARHAWQLTQGATVLGLFRVTPEIPAGLPSPRSE

SEQ ID NO: 128 - protein, 174 aa, Artificial sequence
  synthetic sequence
  misc_feature (43)..(43): any amino acid other than glycine
PAGLLDLRQGMFAQLVAQNVLLIGGPLSWYSDPGLAGVSLTGXLSYKEDTKELVVAKAGVYYVFFQLELRRVVAGEGSGSVSLALHLQPLRSAAGAAALALTVDLPPASSEARNSAFGFQGRLLHLSAGQRLGVHLHTEARARHAWQLTQGATVLGLFRVTPEIPAGLPSPRSE

SEQ ID NO: 129 - protein, 174 aa, Artificial sequence
  synthetic sequence
  misc_feature (44)..(44): any amino acid other than leucine
PAGLLDLRQGMFAQLVAQNVLLIGGPLSWYSDPGLAGVSLTGGXSYKEDTKELVVAKAGVYYVFFQLELRRVVAGEGSGSVSLALHLQPLRSAAGAAALALTVDLPPASSEARNSAFGFQGRLLHLSAGQRLGVHLHTEARARHAWQLTQGATVLGLFRVTPEIPAGLPSPRSE

SEQ ID NO: 130 - protein, 174 aa, Artificial sequence
  synthetic sequence
  misc_feature (45)..(45): any amino acid other than serine
PAGLLDLRQGMFAQLVAQNVLLIGGPLSWYSDPGLAGVSLTGGLXYKEDTKELVVAKAGVYYVFFQLELRRVVAGEGSGSVSLALHLQPLRSAAGAAALALTVDLPPASSEARNSAFGFQGRLLHLSAGQRLGVHLHTEARARHAWQLTQGATVLGLFRVTPEIPAGLPSPRSE

SEQ ID NO: 131 - protein, 174 aa, Artificial sequence
  synthetic sequence
  misc_feature (46)..(46): any amino acid other than tyrosine
PAGLLDLRQGMFAQLVAQNVLLIGGPLSWYSDPGLAGVSLTGGLSXKEDTKELVVAKAGVYYVFFQLELRRVVAGEGSGSVSLALHLQPLRSAAGAAALALTVDLPPASSEARNSAFGFQGRLLHLSAGQRLGVHLHTEARARHAWQLTQGATVLGLFRVTPEIPAGLPSPRSE

SEQ ID NO: 132 - protein, 174 aa, Artificial sequence
  synthetic sequence
  misc_feature (48)..(48): any amino acid other than glutamic acid
PAGLLDLRQGMFAQLVAQNVLLIGGPLSWYSDPGLAGVSLTGGLSYKXDTKELVVAKAGVYYVFFQLELRRVVAGEGSGSVSLALHLQPLRSAAGAAALALTVDLPPASSEARNSAFGFQGRLLHLSAGQRLGVHLHTEARARHAWQLTQGATVLGLFRVTPEIPAGLPSPRSE

SEQ ID NO: 133 - protein, 174 aa, Artificial sequence
  synthetic sequence
  misc_feature (49)..(49): any amino acid other than aspartic acid
PAGLLDLRQGMFAQLVAQNVLLIGGPLSWYSDPGLAGVSLTGGLSYKEXTKELVVAKAGVYYVFFQLELRRVVAGEGSGSVSLALHLQPLRSAAGAAALALTVDLPPASSEARNSAFGFQGRLLHLSAGQRLGVHLHTEARARHAWQLTQGATVLGLFRVTPEIPAGLPSPRSE

SEQ ID NO: 134 - protein, 174 aa, Artificial sequence
  synthetic sequence
  misc_feature (50)..(50): any amino acid other than threonine
PAGLLDLRQGMFAQLVAQNVLLIGGPLSWYSDPGLAGVSLTGGLSYKEDXKELVVAKAGVYYVFFQLELRRVVAGEGSGSVSLALHLQPLRSAAGAAALALTVDLPPASSEARNSAFGFQGRLLHLSAGQRLGVHLHTEARARHAWQLTQGATVLGLFRVTPEIPAGLPSPRSE

SEQ ID NO: 135 - protein, 174 aa, Artificial sequence
  synthetic sequence
  misc_feature (51)..(51): any amino acid other than lysine
PAGLLDLRQGMFAQLVAQNVLLIGGPLSWYSDPGLAGVSLTGGLSYKEDTXELVVAKAGVYYVFFQLELRRVVAGEGSGSVSLALHLQPLRSAAGAAALALTVDLPPASSEARNSAFGFQGRLLHLSAGQRLGVHLHTEARARHAWQLTQGATVLGLFRVTPEIPAGLPSPRSE

SEQ ID NO: 136 - protein, 174 aa, Artificial sequence
  synthetic sequence
  misc_feature (52)..(52): any amino acid other than glutamic acid
PAGLLDLRQGMFAQLVAQNVLLIGGPLSWYSDPGLAGVSLTGGLSYKEDTKXLVVAKAGVYYVFFQLELRRVVAGEGSGSVSLALHLQPLRSAAGAAALALTVDLPPASSEARNSAFGFQGRLLHLSAGQRLGVHLHTEARARHAWQLTQGATVLGLFRVTPEIPAGLPSPRSE

SEQ ID NO: 137 - protein, 174 aa, Artificial sequence
  synthetic sequence
  misc_feature (64)..(64): any amino acid other than phenylalanine
PAGLLDLRQGMFAQLVAQNVLLIGGPLSWYSDPGLAGVSLTGGLSYKEDTKELVVAKAGVYYVXFQLELRRVVAGEGSGSVSLALHLQPLRSAAGAAALALTVDLPPASSEARNSAFGFQGRLLHLSAGQRLGVHLHTEARARHAWQLTQGATVLGLFRVTPEIPAGLPSPRSE

SEQ ID NO: 138 - protein, 174 aa, Artificial sequence
  synthetic sequence
  misc_feature (65)..(65): any amino acid other than phenylalanine
PAGLLDLRQGMFAQLVAQNVLLIGGPLSWYSDPGLAGVSLTGGLSYKEDTKELVVAKAGVYYVFXQLELRRVVAGEGSGSVSLALHLQPLRSAAGAAALALTVDLPPASSEARNSAFGFQGRLLHLSAGQRLGVHLHTEARARHAWQLTQGATVLGLFRVTPEIPAGLPSPRSE

SEQ ID NO: 139 - protein, 174 aa, Artificial sequence
  synthetic sequence
  misc_feature (66)..(66): any amino acid other than glutamine
PAGLLDLRQGMFAQLVAQNVLLIGGPLSWYSDPGLAGVSLTGGLSYKEDTKELVVAKAGVYYVFFXLELRRVVAGEGSGSVSLALHLQPLRSAAGAAALALTVDLPPASSEARNSAFGFQGRLLHLSAGQRLGVHLHTEARARHAWQLTQGATVLGLFRVTPEIPAGLPSPRSE

SEQ ID NO: 140 - protein, 174 aa, Artificial sequence
  synthetic sequence
  misc_feature (67)..(67): any amino acid other than leucine
PAGLLDLRQGMFAQLVAQNVLLIGGPLSWYSDPGLAGVSLTGGLSYKEDTKELVVAKAGVYYVFFQXELRRVVAGEGSGSVSLALHLQPLRSAAGAAALALTVDLPPASSEARNSAFGFQGRLLHLSAGQRLGVHLHTEARARHAWQLTQGATVLGLFRVTPEIPAGLPSPRSE

SEQ ID NO: 141 - protein, 174 aa, Artificial sequence
  synthetic sequence
  misc_feature (68)..(68): any amino acid other than glutamic acid
PAGLLDLRQGMFAQLVAQNVLLIGGPLSWYSDPGLAGVSLTGGLSYKEDTKELVVAKAGVYYVFFQLXLRRVVAGEGSGSVSLALHLQPLRSAAGAAALALTVDLPPASSEARNSAFGFQGRLLHLSAGQRLGVHLHTEARARHAWQLTQGATVLGLFRVTPEIPAGLPSPRSE

SEQ ID NO: 142 - protein, 174 aa, Artificial sequence
  synthetic sequence
  misc_feature (69)..(69): any amino acid other than leucine
PAGLLDLRQGMFAQLVAQNVLLIGGPLSWYSDPGLAGVSLTGGLSYKEDTKELVVAKAGVYYVFFQLEXRRVVAGEGSGSVSLALHLQPLRSAAGAAALALTVDLPPASSEARNSAFGFQGRLLHLSAGQRLGVHLHTEARARHAWQLTQGATVLGLFRVTPEIPAGLPSPRSE

SEQ ID NO: 143 - protein, 174 aa, Artificial sequence
  synthetic sequence
  misc_feature (70)..(70): any amino acid other than arginine
PAGLLDLRQGMFAQLVAQNVLLIGGPLSWYSDPGLAGVSLTGGLSYKEDTKELVVAKAGVYYVFFQLELXRVVAGEGSGSVSLALHLQPLRSAAGAAALALTVDLPPASSEARNSAFGFQGRLLHLSAGQRLGVHLHTEARARHAWQLTQGATVLGLFRVTPEIPAGLPSPRSE

SEQ ID NO: 144 - protein, 174 aa, Artificial sequence
  synthetic sequence
  misc_feature (71)..(71): any amino acid other than arginine
PAGLLDLRQGMFAQLVAQNVLLIGGPLSWYSDPGLAGVSLTGGLSYKEDTKELVVAKAGVYYVFFQLELRXVVAGEGSGSVSLALHLQPLRSAAGAAALALTVDLPPASSEARNSAFGFQGRLLHLSAGQRLGVHLHTEARARHAWQLTQGATVLGLFRVTPEIPAGLPSPRSE

SEQ ID NO: 145 - protein, 174 aa, Artificial sequence
  synthetic sequence
  misc_feature (72)..(72): any amino acid other than valine
PAGLLDLRQGMFAQLVAQNVLLIGGPLSWYSDPGLAGVSLTGGLSYKEDTKELVVAKAGVYYVFFQLELRRXVAGEGSGSVSLALHLQPLRSAAGAAALALTVDLPPASSEARNSAFGFQGRLLHLSAGQRLGVHLHTEARARHAWQLTQGATVLGLFRVTPEIPAGLPSPRSE

SEQ ID NO: 146 - protein, 174 aa, Artificial sequence
  synthetic sequence
  misc_feature (73)..(73): any amino acid other than valine
PAGLLDLRQGMFAQLVAQNVLLIGGPLSWYSDPGLAGVSLTGGLSYKEDTKELVVAKAGVYYVFFQLELRRVXAGEGSGSVSLALHLQPLRSAAGAAALALTVDLPPASSEARNSAFGFQGRLLHLSAGQRLGVHLHTEARARHAWQLTQGATVLGLFRVTPEIPAGLPSPRSE

SEQ ID NO: 147 - protein, 174 aa, Artificial sequence
  synthetic sequence
  misc_feature (75)..(75): any amino acid other than glycine
PAGLLDLRQGMFAQLVAQNVLLIGGPLSWYSDPGLAGVSLTGGLSYKEDTKELVVAKAGVYYVFFQLELRRVVAXEGSGSVSLALHLQPLRSAAGAAALALTVDLPPASSEARNSAFGFQGRLLHLSAGQRLGVHLHTEARARHAWQLTQGATVLGLFRVTPEIPAGLPSPRSE

SEQ ID NO: 148 - protein, 174 aa, Artificial sequence
  synthetic sequence
  misc_feature (76)..(76): any amino acid other than glutamic acid
PAGLLDLRQGMFAQLVAQNVLLIGGPLSWYSDPGLAGVSLTGGLSYKEDTKELVVAKAGVYYVFFQLELRRVVAGXGSGSVSLALHLQPLRSAAGAAALALTVDLPPASSEARNSAFGFQGRLLHLSAGQRLGVHLHTEARARHAWQLTQGATVLGLFRVTPEIPAGLPSPRSE

SEQ ID NO: 149 - protein, 174 aa, Artificial sequence
  synthetic sequence
  misc_feature (77)..(77): any amino acid other than glycine
PAGLLDLRQGMFAQLVAQNVLLIGGPLSWYSDPGLAGVSLTGGLSYKEDTKELVVAKAGVYYVFFQLELRRVVAGEXSGSVSLALHLQPLRSAAGAAALALTVDLPPASSEARNSAFGFQGRLLHLSAGQRLGVHLHTEARARHAWQLTQGATVLGLFRVTPEIPAGLPSPRSE

SEQ ID NO: 150 - protein, 174 aa, Artificial sequence
  synthetic sequence
  misc_feature (78)..(78): any amino acid other than serine
PAGLLDLRQGMFAQLVAQNVLLIGGPLSWYSDPGLAGVSLTGGLSYKEDTKELVVAKAGVYYVFFQLELRRVVAGEGXGSVSLALHLQPLRSAAGAAALALTVDLPPASSEARNSAFGFQGRLLHLSAGQRLGVHLHTEARARHAWQLTQGATVLGLFRVTPEIPAGLPSPRSE

SEQ ID NO: 151 - protein, 174 aa, Artificial sequence
  synthetic sequence
  misc_feature (104)..(104): any amino acid other than aspartic acid
PAGLLDLRQGMFAQLVAQNVLLIGGPLSWYSDPGLAGVSLTGGLSYKEDTKELVVAKAGVYYVFFQLELRRVVAGEGSGSVSLALHLQPLRSAAGAAALALTVXLPPASSEARNSAFGFQGRLLHLSAGQRLGVHLHTEARARHAWQLTQGATVLGLFRVTPEIPAGLPSPRSE

SEQ ID NO: 152 - protein, 174 aa, Artificial sequence
  synthetic sequence
  misc_feature (105)..(105): any amino acid other than leucine
PAGLLDLRQGMFAQLVAQNVLLIGGPLSWYSDPGLAGVSLTGGLSYKEDTKELVVAKAGVYYVFFQLELRRVVAGEGSGSVSLALHLQPLRSAAGAAALALTVDXPPASSEARNSAFGFQGRLLHLSAGQRLGVHLHTEARARHAWQLTQGATVLGLFRVTPEIPAGLPSPRSE

SEQ ID NO: 153 - protein, 174 aa, Artificial sequence
  synthetic sequence
  misc_feature (106)..(106): any amino acid other than proline
PAGLLDLRQGMFAQLVAQNVLLIGGPLSWYSDPGLAGVSLTGGLSYKEDTKELVVAKAGVYYVFFQLELRRVVAGEGSGSVSLALHLQPLRSAAGAAALALTVDLXPASSEARNSAFGFQGRLLHLSAGQRLGVHLHTEARARHAWQLTQGATVLGLFRVTPEIPAGLPSPRSE

SEQ ID NO: 154 - protein, 174 aa, Artificial sequence
  synthetic sequence
  misc_feature (109)..(109): any amino acid other than serine
PAGLLDLRQGMFAQLVAQNVLLIGGPLSWYSDPGLAGVSLTGGLSYKEDTKELVVAKAGVYYVFFQLELRRVVAGEGSGSVSLALHLQPLRSAAGAAALALTVDLPPAXSEARNSAFGFQGRLLHLSAGQRLGVHLHTEARARHAWQLTQGATVLGLFRVTPEIPAGLPSPRSE

SEQ ID NO: 155 - protein, 174 aa, Artificial sequence
  synthetic sequence
  misc_feature (110)..(110): any amino acid other than serine
PAGLLDLRQGMFAQLVAQNVLLIGGPLSWYSDPGLAGVSLTGGLSYKEDTKELVVAKAGVYYVFFQLELRRVVAGEGSGSVSLALHLQPLRSAAGAAALALTVDLPPASXEARNSAFGFQGRLLHLSAGQRLGVHLHTEARARHAWQLTQGATVLGLFRVTPEIPAGLPSPRSE

SEQ ID NO: 156 - protein, 174 aa, Artificial sequence
  synthetic sequence
  misc_feature (111)..(111): any amino acid other than glutamic acid
PAGLLDLRQGMFAQLVAQNVLLIGGPLSWYSDPGLAGVSLTGGLSYKEDTKELVVAKAGVYYVFFQLELRRVVAGEGSGSVSLALHLQPLRSAAGAAALALTVDLPPASSXARNSAFGFQGRLLHLSAGQRLGVHLHTEARARHAWQLTQGATVLGLFRVTPEIPAGLPSPRSE

SEQ ID NO: 157 - protein, 174 aa, Artificial sequence
  synthetic sequence
  misc_feature (113)..(113): any amino acid other than arginine
PAGLLDLRQGMFAQLVAQNVLLIGGPLSWYSDPGLAGVSLTGGLSYKEDTKELVVAKAGVYYVFFQLELRRVVAGEGSGSVSLALHLQPLRSAAGAAALALTVDLPPASSEAXNSAFGFQGRLLHLSAGQRLGVHLHTEARARHAWQLTQGATVLGLFRVTPEIPAGLPSPRSE

SEQ ID NO: 158 - protein, 174 aa, Artificial sequence
  synthetic sequence
  misc_feature (114)..(114): any amino acid other than asparagine
PAGLLDLRQGMFAQLVAQNVLLIGGPLSWYSDPGLAGVSLTGGLSYKEDTKELVVAKAGVYYVFFQLELRRVVAGEGSGSVSLALHLQPLRSAAGAAALALTVDLPPASSEARXSAFGFQGRLLHLSAGQRLGVHLHTEARARHAWQLTQGATVLGLFRVTPEIPAGLPSPRSE

SEQ ID NO: 159 - protein, 174 aa, Artificial sequence
  synthetic sequence
  misc_feature (115)..(115): any amino acid other than serine
PAGLLDLRQGMFAQLVAQNVLLIGGPLSWYSDPGLAGVSLTGGLSYKEDTKELVVAKAGVYYVFFQLELRRVVAGEGSGSVSLALHLQPLRSAAGAAALALTVDLPPASSEARNXAFGFQGRLLHLSAGQRLGVHLHTEARARHAWQLTQGATVLGLFRVTPEIPAGLPSPRSE

SEQ ID NO: 160 - protein, 174 aa, Artificial sequence
  synthetic sequence
  misc_feature (117)..(117): any amino acid other than phenylalanine
PAGLLDLRQGMFAQLVAQNVLLIGGPLSWYSDPGLAGVSLTGGLSYKEDTKELVVAKAGVYYVFFQLELRRVVAGEGSGSVSLALHLQPLRSAAGAAALALTVDLPPASSEARNSAXGFQGRLLHLSAGQRLGVHLHTEARARHAWQLTQGATVLGLFRVTPEIPAGLPSPRSE

SEQ ID NO: 161 - protein, 174 aa, Artificial sequence
  synthetic sequence
  misc_feature (130)..(130): any amino acid other than glutamine
PAGLLDLRQGMFAQLVAQNVLLIGGPLSWYSDPGLAGVSLTGGLSYKEDTKELVVAKAGVYYVFFQLELRRVVAGEGSGSVSLALHLQPLRSAAGAAALALTVDLPPASSEARNSAFGFQGRLLHLSAGXRLGVHLHTEARARHAWQLTQGATVLGLFRVTPEIPAGLPSPRSE

SEQ ID NO: 162 - protein, 174 aa, Artificial sequence
  synthetic sequence
  misc_feature (131)..(131): any amino acid other than arginine
PAGLLDLRQGMFAQLVAQNVLLIGGPLSWYSDPGLAGVSLTGGLSYKEDTKELVVAKAGVYYVFFQLELRRVVAGEGSGSVSLALHLQPLRSAAGAAALALTVDLPPASSEARNSAFGFQGRLLHLSAGQXLGVHLHTEARARHAWQLTQGATVLGLFRVTPEIPAGLPSPRSE

SEQ ID NO: 163 - protein, 174 aa, Artificial sequence
  synthetic sequence
  misc_feature (132)..(132): any amino acid other than leucine
PAGLLDLRQGMFAQLVAQNVLLIGGPLSWYSDPGLAGVSLTGGLSYKEDTKELVVAKAGVYYVFFQLELRRVVAGEGSGSVSLALHLQPLRSAAGAAALALTVDLPPASSEARNSAFGFQGRLLHLSAGQRXGVHLHTEARARHAWQLTQGATVLGLFRVTPEIPAGLPSPRSE

SEQ ID NO: 164 - protein, 174 aa, Artificial sequence
  synthetic sequence
  misc_feature (133)..(133): any amino acid other than glycine
PAGLLDLRQGMFAQLVAQNVLLIGGPLSWYSDPGLAGVSLTGGLSYKEDTKELVVAKAGVYYVFFQLELRRVVAGEGSGSVSLALHLQPLRSAAGAAALALTVDLPPASSEARNSAFGFQGRLLHLSAGQRLXVHLHTEARARHAWQLTQGATVLGLFRVTPEIPAGLPSPRSE

SEQ ID NO: 165 - protein, 174 aa, Artificial sequence
  synthetic sequence
  misc_feature (134)..(134): any amino acid other than valine
PAGLLDLRQGMFAQLVAQNVLLIGGPLSWYSDPGLAGVSLTGGLSYKEDTKELVVAKAGVYYVFFQLELRRVVAGEGSGSVSLALHLQPLRSAAGAAALALTVDLPPASSEARNSAFGFQGRLLHLSAGQRLGXHLHTEARARHAWQLTQGATVLGLFRVTPEIPAGLPSPRSE

SEQ ID NO: 166 - protein, 174 aa, Artificial sequence
  synthetic sequence
  misc_feature (135)..(135): any amino acid other than histidine
PAGLLDLRQGMFAQLVAQNVLLIGGPLSWYSDPGLAGVSLTGGLSYKEDTKELVVAKAGVYYVFFQLELRRVVAGEGSGSVSLALHLQPLRSAAGAAALALTVDLPPASSEARNSAFGFQGRLLHLSAGQRLGVXLHTEARARHAWQLTQGATVLGLFRVTPEIPAGLPSPRSE

SEQ ID NO: 167 - protein, 174 aa, Artificial sequence
  synthetic sequence
  misc_feature (136)..(136): any amino acid other than leucine
PAGLLDLRQGMFAQLVAQNVLLIGGPLSWYSDPGLAGVSLTGGLSYKEDTKELVVAKAGVYYVFFQLELRRVVAGEGSGSVSLALHLQPLRSAAGAAALALTVDLPPASSEARNSAFGFQGRLLHLSAGQRLGVHXHTEARARHAWQLTQGATVLGLFRVTPEIPAGLPSPRSE

SEQ ID NO: 168 - protein, 174 aa, Artificial sequence
  synthetic sequence
  misc_feature (137)..(137): any amino acid other than histidine
PAGLLDLRQGMFAQLVAQNVLLIGGPLSWYSDPGLAGVSLTGGLSYKEDTKELVVAKAGVYYVFFQLELRRVVAGEGSGSVSLALHLQPLRSAAGAAALALTVDLPPASSEARNSAFGFQGRLLHLSAGQRLGVHLXTEARARHAWQLTQGATVLGLFRVTPEIPAGLPSPRSE

SEQ ID NO: 169 - protein, 174 aa, Artificial sequence
  synthetic sequence
  misc_feature (138)..(138): any amino acid other than threonine
PAGLLDLRQGMFAQLVAQNVLLIGGPLSWYSDPGLAGVSLTGGLSYKEDTKELVVAKAGVYYVFFQLELRRVVAGEGSGSVSLALHLQPLRSAAGAAALALTVDLPPASSEARNSAFGFQGRLLHLSAGQRLGVHLHXEARARHAWQLTQGATVLGLFRVTPEIPAGLPSPRSE

SEQ ID NO: 170 - protein, 174 aa, Artificial sequence
  synthetic sequence
  misc_feature (139)..(139): any amino acid other than glutamic acid
PAGLLDLRQGMFAQLVAQNVLLIGGPLSWYSDPGLAGVSLTGGLSYKEDTKELVVAKAGVYYVFFQLELRRVVAGEGSGSVSLALHLQPLRSAAGAAALALTVDLPPASSEARNSAFGFQGRLLHLSAGQRLGVHLHTXARARHAWQLTQGATVLGLFRVTPEIPAGLPSPRSE

SEQ ID NO: 171 - protein, 174 aa, Artificial sequence
  synthetic sequence
  misc_feature (141)..(141): any amino acid other than arginine
PAGLLDLRQGMFAQLVAQNVLLIGGPLSWYSDPGLAGVSLTGGLSYKEDTKELVVAKAGVYYVFFQLELRRVVAGEGSGSVSLALHLQPLRSAAGAAALALTVDLPPASSEARNSAFGFQGRLLHLSAGQRLGVHLHTEAXARHAWQLTQGATVLGLFRVTPEIPAGLPSPRSE

SEQ ID NO: 172 - protein, 174 aa, Artificial sequence
  synthetic sequence
  misc_feature (143)..(143): any amino acid other than arginine
PAGLLDLRQGMFAQLVAQNVLLIGGPLSWYSDPGLAGVSLTGGLSYKEDTKELVVAKAGVYYVFFQLELRRVVAGEGSGSVSLALHLQPLRSAAGAAALALTVDLPPASSEARNSAFGFQGRLLHLSAGQRLGVHLHTEARAXHAWQLTQGATVLGLFRVTPEIPAGLPSPRSE

SEQ ID NO: 173 - protein, 174 aa, Artificial sequence
  synthetic sequence
  misc_feature (144)..(144): any amino acid other than histidine
PAGLLDLRQGMFAQLVAQNVLLIGGPLSWYSDPGLAGVSLTGGLSYKEDTKELVVAKAGVYYVFFQLELRRVVAGEGSGSVSLALHLQPLRSAAGAAALALTVDLPPASSEARNSAFGFQGRLLHLSAGQRLGVHLHTEARARXAWQLTQGATVLGLFRVTPEIPAGLPSPRSE

SEQ ID NO: 174 - protein, 174 aa, Artificial sequence
  synthetic sequence
  misc_feature (146)..(146): any amino acid other than tryptophan
PAGLLDLRQGMFAQLVAQNVLLIGGPLSWYSDPGLAGVSLTGGLSYKEDTKELVVAKAGVYYVFFQLELRRVVAGEGSGSVSLALHLQPLRSAAGAAALALTVDLPPASSEARNSAFGFQGRLLHLSAGQRLGVHLHTEARARHAXQLTQGATVLGLFRVTPEIPAGLPSPRSE

SEQ ID NO: 175 - protein, 174 aa, Artificial sequence
  synthetic sequence
  misc_feature (148)..(148): any amino acid other than leucine
PAGLLDLRQGMFAQLVAQNVLLIGGPLSWYSDPGLAGVSLTGGLSYKEDTKELVVAKAGVYYVFFQLELRRVVAGEGSGSVSLALHLQPLRSAAGAAALALTVDLPPASSEARNSAFGFQGRLLHLSAGQRLGVHLHTEARARHAWQXTQGATVLGLFRVTPEIPAGLPSPRSE

SEQ ID NO: 176 - protein, 174 aa, Artificial sequence
  synthetic sequence
  misc_feature (149)..(149): any amino acid other than threonine
PAGLLDLRQGMFAQLVAQNVLLIGGPLSWYSDPGLAGVSLTGGLSYKEDTKELVVAKAGVYYVFFQLELRRVVAGEGSGSVSLALHLQPLRSAAGAAALALTVDLPPASSEARNSAFGFQGRLLHLSAGQRLGVHLHTEARARHAWQLXQGATVLGLFRVTPEIPAGLPSPRSE

SEQ ID NO: 177 - protein, 174 aa, Artificial sequence
  synthetic sequence
  misc_feature (150)..(150): any amino acid other than glutamine
PAGLLDLRQGMFAQLVAQNVLLIGGPLSWYSDPGLAGVSLTGGLSYKEDTKELVVAKAGVYYVFFQLELRRVVAGEGSGSVSLALHLQPLRSAAGAAALALTVDLPPASSEARNSAFGFQGRLLHLSAGQRLGVHLHTEARARHAWQLTXGATVLGLFRVTPEIPAGLPSPRSE

SEQ ID NO: 178 - protein, 174 aa, Artificial sequence
  synthetic sequence
  misc_feature (151)..(151): any amino acid other than glycine
PAGLLDLRQGMFAQLVAQNVLLIGGPLSWYSDPGLAGVSLTGGLSYKEDTKELVVAKAGVYYVFFQLELRRVVAGEGSGSVSLALHLQPLRSAAGAAALALTVDLPPASSEARNSAFGFQGRLLHLSAGQRLGVHLHTEARARHAWQLTQXATVLGLFRVTPEIPAGLPSPRSE

SEQ ID NO: 179 - protein, 174 aa, Artificial sequence
  synthetic sequence
  misc_feature (153)..(153): any amino acid other than threonine
PAGLLDLRQGMFAQLVAQNVLLIGGPLSWYSDPGLAGVSLTGGLSYKEDTKELVVAKAGVYYVFFQLELRRVVAGEGSGSVSLALHLQPLRSAAGAAALALTVDLPPASSEARNSAFGFQGRLLHLSAGQRLGVHLHTEARARHAWQLTQGAXVLGLFRVTPEIPAGLPSPRSE

SEQ ID NO: 180 - protein, 174 aa, Artificial sequence
  synthetic sequence
  misc_feature (154)..(154): any amino acid other than valine
PAGLLDLRQGMFAQLVAQNVLLIGGPLSWYSDPGLAGVSLTGGLSYKEDTKELVVAKAGVYYVFFQLELRRVVAGEGSGSVSLALHLQPLRSAAGAAALALTVDLPPASSEARNSAFGFQGRLLHLSAGQRLGVHLHTEARARHAWQLTQGATXLGLFRVTPEIPAGLPSPRSE

SEQ ID NO: 181 - protein, 133 aa, Artificial sequence
  synthetic sequence
  misc_feature (42)..(42): any amino acid other than phenylalanine
APTSSSTKKTQLQLEHLLLDLQMILNGINNYKNPKLTRMLTXKFYMPKKATELKHLQCLEEELKPLEEVLNLAQSKNFHLRPRDLISNINVIVLELKGSETTFMCEYADETATIVEFLNRWITFCQSIISTLT

SEQ ID NO: 182 - protein, 133 aa, Artificial sequence
  synthetic sequence
  misc_feature (20)..(20): any amino acid other than aspartic acid
APTSSSTKKTQLQLEHLLLXLQMILNGINNYKNPKLTRMLTFKFYMPKKATELKHLQCLEEELKPLEEVLNLAQSKNFHLRPRDLISNINVIVLELKGSETTFMCEYADETATIVEFLNRWITFCQSIISTLT

SEQ ID NO: 183 - protein, 133 aa, Artificial sequence
  synthetic sequence
  misc_feature (15)..(15): any amino acid other than glutamic acid
APTSSSTKKTQLQLXHLLLDLQMILNGINNYKNPKLTRMLTFKFYMPKKATELKHLQCLEEELKPLEEVLNLAQSKNFHLRPRDLISNINVIVLELKGSETTFMCEYADETATIVEFLNRWITFCQSIISTLT

SEQ ID NO: 184 - protein, 133 aa, Artificial sequence
  synthetic sequence
  misc_feature (16)..(16): any amino acid other than histidine
APTSSSTKKTQLQLEXLLLDLQMILNGINNYKNPKLTRMLTFKFYMPKKATELKHLQCLEEELKPLEEVLNLAQSKNFHLRPRDLISNINVIVLELKGSETTFMCEYADETATIVEFLNRWITFCQSIISTLT

SEQ ID NO: 185 - protein, 133 aa, Artificial sequence; identical to SEQ ID NO: 184
  synthetic sequence
  misc_feature (16)..(16): any amino acid other than histidine

SEQ ID NO: 186 - protein, 133 aa, Artificial sequence
  synthetic sequence
  misc_feature (45)..(45): any amino acid other than tyrosine
APTSSSTKKTQLQLEHLLLDLQMILNGINNYKNPKLTRMLTFKFXMPKKATELKHLQCLEEELKPLEEVLNLAQSKNFHLRPRDLISNINVIVLELKGSETTFMCEYADETATIVEFLNRWITFCQSIISTLT

SEQ ID NO: 187 - protein, 133 aa, Artificial sequence
  synthetic sequence
  misc_feature (126)..(126): any amino acid other than glutamine
APTSSSTKKTQLQLEHLLLDLQMILNGINNYKNPKLTRMLTFKFYMPKKATELKHLQCLEEELKPLEEVLNLAQSKNFHLRPRDLISNINVIVLELKGSETTFMCEYADETATIVEFLNRWITFCXSIISTLT

SEQ ID NO: 188 - protein, 133 aa, Artificial sequence
  synthetic sequence
  misc_feature (16)..(16): any amino acid other than histidine
  misc_feature (42)..(42): any amino acid other than phenylalanine
APTSSSTKKTQLQLEXLLLDLQMILNGINNYKNPKLTRMLTXKFYMPKKATELKHLQCLEEELKPLEEVLNLAQSKNFHLRPRDLISNINVIVLELKGSETTFMCEYADETATIVEFLNRWITFCQSIISTLT

SEQ ID NO: 189 - protein, 133 aa, Artificial sequence
  synthetic sequence
  misc_feature (20)..(20): any amino acid other than aspartic acid
  misc_feature (42)..(42): any amino acid other than phenylalanine
APTSSSTKKTQLQLEHLLLXLQMILNGINNYKNPKLTRMLTXKFYMPKKATELKHLQCLEEELKPLEEVLNLAQSKNFHLRPRDLISNINVIVLELKGSETTFMCEYADETATIVEFLNRWITFCQSIISTLT

SEQ ID NO: 190 - protein, 133 aa, Artificial sequence
  synthetic sequence
  Misc_feature (15)..(15): any amino acid other than glutamic aicd
  Misc_feature (20)..(20): any amino acid other than aspartic acid
  Misc_feature (42)..(42): any amino acid other than phenylalanine
APTSSSTKKTQLQLXHLLLXLQMILNGINNYKNPKLTRMLTXKFYMPKKATELKHLQCLEEELKPLEEVLNLAQSKNFHLRPRDLISNINVIVLELKGSETTFMCEYADETATIVEFLNRWITFCQSIISTLT

SEQ ID NO: 191 - protein, 133 aa, Artificial sequence
  synthetic sequence
  Misc_feature (16)..(16): any amino acid other than histidine
  Misc_feature (20)..(20): any amino acid other than aspartic acid
  Misc_feature (42)..(42): any amino acid other than phenylalanine
APTSSSTKKTQLQLEXLLLXLQMILNGINNYKNPKLTRMLTXKFYMPKKATELKHLQCLEEELKPLEEVLNLAQSKNFHLRPRDLISNINVIVLELKGSETTFMCEYADETATIVEFLNRWITFCQSIISTLT

SEQ ID NO: 192 - protein, 133 aa, Artificial sequence
  synthetic sequence
  Misc_feature (20)..(20): any amino acid other than aspartic acid
  Misc_feature (42)..(42): any amino acid other than phenylalanine
  Misc_feature (126)..(126): any amino acid other than glutamine
APTSSSTKKTQLQLEHLLLXLQMILNGINNYKNPKLTRMLTXKFYMPKKATELKHLQCLEEELKPLEEVLNLAQSKNFHLRPRDLISNINVIVLELKGSETTFMCEYADETATIVEFLNRWITFCXSIISTLT

SEQ ID NO: 193 - protein, 133 aa, Artificial sequence
  synthetic sequence
  Misc_feature (20)..(20): any amino acid other than aspartic acid
  Misc_feature (42)..(42): any amino acid other than phenylalanine
  Misc_feature (45)..(45): any amino acid other than tyrosine
APTSSSTKKTQLQLEHLLLXLQMILNGINNYKNPKLTRMLTXKFXMPKKATELKHLQCLEEELKPLEEVLNLAQSKNFHLRPRDLISNINVIVLELKGSETTFMCEYADETATIVEFLNRWITFCQSIISTLT

SEQ ID NO: 194 - protein, 133 aa, Artificial sequence
  synthetic sequence
  Misc_feature (16)..(16): any amino acid other than histidine
  Misc_feature (20)..(20): any amino acid other than aspartic acid
  Misc_feature (42)..(42): any amino acid other than phenylalanine
  Misc_feature (45)..(45): any amino acid other than tyrosine
APTSSSTKKTQLQLEXLLLXLQMILNGINNYKNPKLTRMLTXKFXMPKKATELKHLQCLEEELKPLEEVLNLAQSKNFHLRPRDLISNINVIVLELKGSETTFMCEYADETATIVEFLNRWITFCQSIISTLT

SEQ ID NO: 195 - protein, 133 aa, Artificial sequence
  synthetic sequence
  Misc_feature (20)..(20): any amino acid other than aspartic acid
  Misc_feature (42)..(42): any amino acid other than phenylalanine
  Misc_feature (45)..(45): any amino acid other than tyrosine
  Misc_feature (126)..(126): any amino acid other than glutamine
APTSSSTKKTQLQLEHLLLXLQMILNGINNYKNPKLTRMLTXKFXMPKKATELKHLQCLEEELKPLEEVLNLAQSKNFHLRPRDLISNINVIVLELKGSETTFMCEYADETATIVEFLNRWITFCXSIISTLT

SEQ ID NO: 196 - protein, 133 aa, Artificial sequence
  synthetic sequence
  Misc_feature (16)..(16): any amino acid other than histidine
  Misc_feature (20)..(20): any amino acid other than aspartic acid
  Misc_feature (42)..(42): any amino acid other than phenylalanine
  Misc_feature (45)..(45): any amino acid other than tyrosine
  Misc_feature (126)..(126): any amino acid other than glutamine
APTSSSTKKTQLQLEXLLLXLQMILNGINNYKNPKLTRMLTXKFXMPKKATELKHLQCLEEELKPLEEVLNLAQSKNFHLRPRDLISNINVIVLELKGSETTFMCEYADETATIVEFLNRWITFCXSIISTLT

SEQ ID NO: 197 - protein, 133 aa, Artificial sequence
  synthetic sequence
  Misc_feature (16)..(16): any amino acid other than histidine
  Misc_feature (42)..(42): any amino acid other than phenylalanine
  Misc_feature (126)..(126): any amino acid other than glutamine
APTSSSTKKTQLQLEXLLLDLQMILNGINNYKNPKLTRMLTXKFYMPKKATELKHLQCLEEELKPLEEVLNLAQSKNFHLRPRDLISNINVIVLELKGSETTFMCEYADETATIVEFLNRWITFCXSIISTLT

SEQ ID NO: 198 - protein, 276 aa, Artificial sequence
  synthetic sequence
GSHSMRYFFTSVSRPGRGEPRFIAVGYVDDTQFVRFDSDAASQKMEPRAPWIEQEGPEYWDQETRNMKAHSQTDRANLGTLRGYYNQSEDGSHTIQIMYGCDVGPDGRFLRGYRQDAYDGKDYIALNEDLRSWTAADMAAQITKRKWEAVHAAEQRRVYLEGRCVDGLRRYLENGKETLQRTDPPKTHMTHHPISDHEATLRCWALGFYPAEITLTWQRDGEDQTQDTELVETRPAGDGTFQKWAAVVVPSGEEQRYTCHVQHEGLPKPLTLRWEL

SEQ ID NO: 199 - protein, 276 aa, Artificial sequence [sequence omitted]

SEQ ID NO: 200 - protein, 276 aa, Artificial sequence
  synthetic sequence
GSHSMRYFFTSVSRPGRGEPRFIAVGYVDDTQFVRFDSDAASQRMEPRAPWIEQEGPEYWDQETRNVKAQSQTDRVDLGTLRGYYNQSEAGSHTIQIMYGCDVGSDGRFLRGYRQDAYDGKDYIALNEDLRSWTAADMAAQITKRKWEAAHEAEQLRAYLDGTCVEWLRRYLENGKETLQRTDPPKTHMTHHPISDHEATLRCWALGFYPAEITLTWQRDGEDQTQDTELVETRPAGDGTFQKWAAVVVPSGEEQRYTCHVQHEGLPKPLTLRWEL

SEQ ID NO: 201 - protein, 276 aa, Artificial sequence; identical to SEQ ID NO: 49
  synthetic sequence

SEQ ID NO: 202 - protein, 276 aa, Artificial sequence
  synthetic sequence
GSHSMRYFSTSVSRPGRGEPRFIAVGYVDDTQFVRFDSDAASQRMEPRAPWIEQEGPEYWDEETGKVKAHSQTDRENLRIALRYYNQSEAGSHTLQMMFGCDVGSDGRFLRGYHQYAYDGKDYIALKEDLRSWTAADMAAQITQRKWEAARVAEQLRAYLEGTCVDGLRRYLENGKETLQRTDPPKTHMTHHPISDHEATLRCWALGFYPAEITLTWQRDGEDQTQDTELVETRPAGDGTFQKWAAVVVPSGEEQRYTCHVQHEGLPKPLTLRWEP

SEQ ID NO: 203 - protein, 276 aa, Artificial sequence; identical to SEQ ID NO: 50
  synthetic sequence

SEQ ID NO: 204 - protein, 276 aa, Artificial sequence
  synthetic sequence
GSHSMRYFSTSVSRPGRGEPRFIAVGYVDDTQFVRFDSDAASQRMEPRAPWIEQEGPEYWDEETGKVKAQSQTDRENLRIALRYYNQSEAGSHTLQMMFGCDVGSDGRFLRGYHQYAYDGKDYIALKEDLRSWTAADMAAQITKRKWEAAHVAEQQRAYLEGTCVDGLRRYLENGKETLQRTDPPKTHMTHHPISDHEATLRCWALGFYPAEITLTWQRDGEDQTQDTELVETRPAGDGTFQKWAAVVVPSGEEQRYTCHVQHEGLPKPLTLRWEP

SEQ ID NO: 205 - protein, 276 aa, Artificial sequence; identical to SEQ ID NO: 51
  synthetic sequence

SEQ ID NO: 206 - protein, 276 aa, Artificial sequence
  synthetic sequence
GSHSMRYFYTSVSRPGRGEPRFIAVGYVDDTQFVRFDSDAASQRMEPRAPWIEQEGPEYWDRNTRKVKAQSQTDRVDLGTLRGYYNQSEDGSHTIQRMYGCDVGPDGRFLRGYQQDAYDGKDYIALNEDLRSWTAADMAAQITQRKWETAHEAEQWRAYLEGTCVEWLRRYLENGKETLQRTDAPKTHMTHHAVSDHEATLRCWALSFYPAEITLTWQRDGEDQTQDTELVETRPAGDGTFQKWASVVVPSGQEQRYTCHVQHEGLPKPLTLRWEP

SEQ ID NO: 207 - protein, 276 aa, Artificial sequence [sequence omitted]

SEQ ID NO: 208 - protein, 276 aa, Artificial sequence
  synthetic sequence
GSHSMRYFDTAMSRPGRGEPRFISVGYVDDTQFVRFDSDAASPREEPRAPWIEQEGPEYWDRNTQIFKTNTQTDRESLRNLRGYYNQSEAGSHTLQSMYGCDVGPDGRLLRGHNQYAYDGKDYIALNEDLRSWTAADTAAQITQRKWEAARVAEQDRAYLEGTCVEWLRRYLENGKDTLERADPPKTHVTHHPISDHEATLRCWALGFYPAEITLTWQRDGEDQTQDTELVETRPAGDRTFQKWAAVVVPSGEEQRYTCHVQHEGLPKPLTLRWEP

SEQ ID NO: 209 - protein, 276 aa, Artificial sequence
  synthetic sequence
GSHSMRYFYTAMSRPGRGEPRFIAVGYVDDTQFVRFDSDAASPRMAPRAPWIEQEGPEYWDRNTQISKTNTQTYRESLRNLRGYYNQSEAGSHIIQRMYGCDVGPDGRLLRGYDQSAYDGKDYIALNEDLSSWTAADTAAQITQRKWEAAREAEQLRAYLEGLCVEWLRRYLENGKETLQRADPPKTHVTHHPISDHEATLRCWALGFYPAEITLTWQRDGEDQTQDTELVETRPAGDRTFQKWAAVVVPSGEEQRYTCHVQHEGLPKPLTLRWEP

SEQ ID NO: 210 - protein, 276 aa, Artificial sequence
  synthetic sequence
GSHSMRYFYTSVSRPGRGEPRFISVGYVDDTQFVRFDSDAASPREEPRAPWIEQEGPEYWDRNTQICKTNTQTYRENLRTALRYYNQSEAGSHTLQRMYGCDVGPDGRLLRGHNQFAYDGKDYIALNEDLSSWTAADTAAQITQRKWEAARVAEQLRTYLEGTCVEWLRRYLENGKETLQRADPPKTHVTHHPISDHEATLRCWALGFYPAEITLTWQRDGEDQTQDTELVETRPAGDRTFQKWAAVVVPSGEEQRYTCHVQHEGLPKPLTLRWEP

SEQ ID NO: 211 - protein, 276 aa, Artificial sequence
  synthetic sequence
GSHSMRYFHTAMSRPGRGEPRFITVGYVDDTLFVRFDSDATSPRKEPRAPWIEQEGPEYWDRETQISKTNTQTYRESLRNLRGYYNQSEAGSHTLQRMYGCDVGPDGRLLRGHNQYAYDGKDYIALNEDLRSWTAADTAAQISQRKLEAARVAEQLRAYLEGECVEWLRRYLENGKDKLERADPPKTHVTHHPISDHEATLRCWALGFYPAEITLTWQRDGEDQTQDTELVETRPAGDRTFQKWAAVVVPSGEEQRYTCHVQHEGLPKPLTLRWEP

SEQ ID NO: 212 - protein, 276 aa, Artificial sequence
  synthetic sequence
GSHSMRYFYTAMSRPGRGEPRFIAVGYVDDTQFVRFDSDAASPRMAPRAPWIEQEGPEYWDRETQKYKRQAQTDRVSLRNLRGYYNQSEAGSHTLQRMYGCDVGPDGRLLRGHDQSAYDGKDYIALNEDLSSWTAADTAAQITQRKWEAAREAEQWRAYLEGLCVEWLRRYLENGKETLQRADPPKTHVTHHPISDHEATLRCWALGFYPAEITLTWQRDGEDQTQDTELVETRPAGDRTFQKWAAVVVPSGEEQRYTCHVQHEGLPKPLTLRWEP

SEQ ID NO: 213 - protein, 276 aa, Artificial sequence
  synthetic sequence
GSHSMRYFYTAMSRPGRGEPRFIAVGYVDDTQFVRFDSDAASPRTEPRAPWIEQEGPEYWDRNTQIFKTNTQTYRENLRIALRYYNQSEAGSHIIQRMYGCDLGPDGRLLRGHDQSAYDGKDYIALNEDLSSWTAADTAAQITQRKWEAARVAEQLRAYLEGLCVEWLRRYLENGKETLQRADPPKTHVTHHPVSDHEATLRCWALGFYPAEITLTWQRDGEDQTQDTELVETRPAGDRTFQKWAAVVVPSGEEQRYTCHVQHEGLPKPLTLRWEP

SEQ ID NO: 214 - protein, 276 aa, Artificial sequence
  synthetic sequence
CSHSMKYFFTSVSRPGRGEPRFISVGYVDDTQFVRFDSDAASPRGEPRAPWVEQEGPEYWDRETQKYKRQAQTDRVSLRNLRGYYNQSEAGSHTLQWMCGCDLGPDGRLLRGYDQYAYDGKDYIALNEDLRSWTAADTAAQITQRKWEAAREAEQRRAYLEGTCVEWLRRYLENGKETLQRAEHPKTHVTHHPVSDHEATLRCWALGFYPAEITLTWQWDGEDQTQDTELVETRPAGDGTFQKWAAVMVPSGEEQRYTCHVQHEGLPEPLTLRWEP

SEQ ID NO: 215 - protein, 276 aa, Artificial sequence
  synthetic sequence
GSHSMRYFYTAVSRPGRGEPHFIAVGYVDDTQFVRFDSDAASPRGEPRAPWVEQEGPEYWDRETQKYKRQAQTDRVSLRNLRGYYNQSEARSHIIQRMYGCDVGPDGRLLRGYDQYAYDGKDYIALNEDLRSWTAADTAAQITQRKWEAAREAEQLRAYLEGLCVEWLRRYLKNGKETLQRAEHPKTHVTHHPVSDHEATLRCWALGFYPAEITLTWQWDGEDQTQDTELVETRPAGDGTFQKWAAVVVPSGEEQRYTCHVQHEGLPEPLTLRWEP

SEQ ID NO: 216 - protein, 276 aa, Artificial sequence
  synthetic sequence
GSHSMRYFYTAVSRPGRGEPHFIAVGYVDDTQFVRFDSDAASPRGEPRAPWVEQEGPEYWDRETQKYKRQAQTDRVSLRNLRGYYNQSEAGSHIIQRMYGCDVGPDGRLLRGYDQYAYDGKDYIALNEDLRSWTAADTAAQITQRKWEAAREAEQLRAYLEGLCVEWLRRYLKNGKETLQRAEHPKTHVTHHPVSDHEATLRCWALGFYPAEITLTWQWDGEDQTQDTELVETRPAGDGTFQKWAAVVVPSGEEQRYTCHVQHEGLPEPLTLRWEP

SEQ ID NO: 217 - protein, 276 aa, Artificial sequence
  synthetic sequence
GSHSMRYFSTSVSWPGRGEPRFIAVGYVDDTQFVRFDSDAASPRGEPREPWVEQEGPEYWDRETQKYKRQAQADRVNLRKLRGYYNQSEDGSHTLQRMFGCDLGPDGRLLRGYNQFAYDGKDYIALNEDLRSWTAADTAAQITQRKWEAAREAEQRRAYLEGTCVEWLRRYLENGKETLQRAEHPKTHVTHHPVSDHEATLRCWALGFYPAEITLTWQWDGEDQTQDTELVETRPAGDGTFQKWAAVVVPSGEEQRYTCHVQHEGLPEPLTLRWKP

SEQ ID NO: 218 - protein, 276 aa, Artificial sequence
  synthetic sequence
CSHSMRYFDTAVSRPGRGEPRFISVGYVDDTQFVRFDSDAASPRGEPRAPWVEQEGPEYWDRETQKYKRQAQADRVNLRKLRGYYNQSEDGSHTLQWMYGCDLGPDGRLLRGYDQSAYDGKDYIALNEDLRSWTAADTAAQITQRKWEAAREAEQWRAYLEGTCVEWLRRYLENGKETLQRAEHPKTHVTHHPVSDHEATLRCWALGFYPAEITLTWQRDGEDQTQDTELVETRPAGDGTFQKWAAVVVPSGEEQRYTCHVQHEGLPEPLTLRWEP

SEQ ID NO: 219 - protein, 276 aa, Artificial sequence
  synthetic sequence
CSHSMRYFDTAVSRPGRGEPRFISVGYVDDTQFVRFDSDAASPRGEPRAPWVEQEGPEYWDRETQNYKRQAQADRVSLRNLRGYYNQSEDGSHTLQRMYGCDLGPDGRLLRGYDQSAYDGKDYIALNEDLRSWTAADTAAQITQRKLEAARAAEQLRAYLEGTCVEWLRRYLENGKETLQRAEPPKTHVTHHPLSDHEATLRCWALGFYPAEITLTWQRDGEDQTQDTELVETRPAGDGTFQKWAAVVVPSGQEQRYTCHMQHEGLQEPLTLSWEP

SEQ ID NO: 220 - protein, 276 aa, Artificial sequence
  synthetic sequence
CSHSMRYFDTAVSRPGRGEPRFISVGYVDDTQFVRFDSDAASPRGEPRAPWVEQEGPEYWDRETQKYKRQAQADRVSLRNLRGYYNQSEDGSHTLQRMSGCDLGPDGRLLRGYDQSAYDGKDYIALNEDLRSWTAADTAAQITQRKLEAARAAEQLRAYLEGTCVEWLRRYLENGKETLQRAEPPKTHVTHHPLSDHEATLRCWALGFYPAEITLTWQRDGEDQTQDTELVETRPAGDGTFQKWAAVVVPSGQEQRYTCHMQHEGLQEPLTLSWEP

SEQ ID NO: 221 - protein, 276 aa, Artificial sequence
  synthetic sequence
CSHSMRYFYTAVSRPGRGEPRFIAVGYVDDTQFVQFDSDAASPRGEPRAPWVEQEGPEYWDRETQKYKRQAQTDRVSLRNLRGYYNQSEAGSHTLQRMYGCDLGPDGRLLRGYNQFAYDGKDYIALNEDLRSWTAADTAAQITQRKWEAARTAEQLRAYLEGTCVEWLRRYLENGKKTLQRAEHPKTHVTHHPVSDHEATLRCWALGFYPAEITLTWQRDGEDQTQDTELVETRPAGDGTFQKWAAVVVPSGEEQRYTCHVQHEGLPEPLTLRWGP

SEQ ID NO: 222 - protein, 276 aa, Artificial sequence
  synthetic sequence
CSHSMRYFYTAVSRPGRGEPHFIAVGYVDDTQFVRFDSDAASPRGEPRAPWVEQEGPEYWDRETQNYKRQAQTDRVNLRKLRGYYNQSEAGSHIIQRMYGCDLGPDGRLLRGHDQLAYDGKDYIALNEDLRSWTAADTAAQITQRKWEAAREAEQLRAYLEGTCVEWLRRYLENGKETLQRAEHPKTHVTHHPVSDHEATLRCWALGFYPAEITLTWQRDGEDQTQDTELVETRPAGDGTFQKWAAVVVPSGEEQRYTCHVQHEGLPEPLTLRWEP

SEQ ID NO: 223 - protein, 10 aa, Artificial sequence
  synthetic sequence
  misc_feature (1)..(10): Xaa can be any naturally occurring amino acid
XXXXXXXXXX

SEQ ID NO: 224 - protein, 10 aa, Artificial sequence
  synthetic sequence
  misc_feature (1)..(10): Xaa can be any naturally occurring amino acid
XXXXXXXXXX

SEQ ID NO: 225 - protein, 10 aa, Artificial sequence
  synthetic sequence
  misc_feature (1)..(10): Xaa can be any naturally occurring amino acid
XXXXXXXXXX

SEQ ID NO: 226 - protein, 10 aa, Artificial sequence
  synthetic sequence
  misc_feature (1)..(10): Xaa can be any naturally occurring amino acid
XXXXXXXXXX

SEQ ID NO: 227 - protein, 10 aa, Artificial sequence
  synthetic sequence
  misc_feature (1)..(10): Xaa can be any naturally occurring amino acid
XXXXXXXXXX

SEQ ID NO: 228 - protein, 10 aa, Artificial sequence
  synthetic sequence
  misc_feature (1)..(10): Xaa can be any naturally occurring amino acid
XXXXXXXXXX

SEQ ID NO: 229 - protein, 10 aa, Artificial sequence
  synthetic sequence
  misc_feature (1)..(10): Xaa can be any naturally occurring amino acid
XXXXXXXXXX

SEQ ID NO: 230 - protein, 10 aa, Artificial sequence
  synthetic sequence
  misc_feature (1)..(10): Xaa can be any naturally occurring amino acid
XXXXXXXXXX

SEQ ID NO: 231 - protein, 10 aa, Artificial sequence
  synthetic sequence
  misc_feature (1)..(10): Xaa can be any naturally occurring amino acid
XXXXXXXXXX

SEQ ID NO: 232 - protein, 10 aa, Artificial sequence
  synthetic sequence
  misc_feature (1)..(10): Xaa can be any naturally occurring amino acid
XXXXXXXXXX

SEQ ID NO: 233 - protein, 10 aa, Artificial sequence
  synthetic sequence
  misc_feature (1)..(10): Xaa can be any naturally occurring amino acid
XXXXXXXXXX

SEQ ID NO: 234 - protein, 10 aa, Artificial sequence
  synthetic sequence
  misc_feature (1)..(10): Xaa can be any naturally occurring amino acid
XXXXXXXXXX

SEQ ID NO: 235 - protein, 10 aa, Artificial sequence
  synthetic sequence
  misc_feature (1)..(10): Xaa can be any naturally occurring amino acid
XXXXXXXXXX

SEQ ID NO: 236 - protein, 10 aa, Artificial sequence
  synthetic sequence
  misc_feature (1)..(10): Xaa can be any naturally occurring amino acid
XXXXXXXXXX

SEQ ID NO: 237 - protein, 10 aa, Artificial sequence
  synthetic sequence
  misc_feature (1)..(10): Xaa can be any naturally occurring amino acid
XXXXXXXXXX

SEQ ID NO: 238 - protein, 10 aa, Artificial sequence
  synthetic sequence
  misc_feature (1)..(10): Xaa can be any naturally occurring amino acid
XXXXXXXXXX

SEQ ID NO: 239 - protein, 10 aa, Artificial sequence
  synthetic sequence
  misc_feature (1)..(10): Xaa can be any naturally occurring amino acid
XXXXXXXXXX

SEQ ID NO: 240 - protein, 10 aa, Artificial sequence
  synthetic sequence
  misc_feature (1)..(10): Xaa can be any naturally occurring amino acid
XXXXXXXXXX

SEQ ID NO: 241 - protein, 10 aa, Artificial sequence
  synthetic sequence
  misc_feature (1)..(10): Xaa can be any naturally occurring amino acid
XXXXXXXXXX

SEQ ID NO: 242 - protein, 10 aa, Artificial sequence
  synthetic sequence
  misc_feature (1)..(10): Xaa can be any naturally occurring amino acid
XXXXXXXXXX

SEQ ID NO: 243 - protein, 10 aa, Artificial sequence
  synthetic sequence
  misc_feature (1)..(10): Xaa can be any naturally occurring amino acid
XXXXXXXXXX

SEQ ID NO: 244 - protein, 10 aa, Artificial sequence
  synthetic sequence
  misc_feature (1)..(10): Xaa can be any naturally occurring amino acid
XXXXXXXXXX

SEQ ID NO: 245 - protein, 10 aa, Artificial sequence
  synthetic sequence
  misc_feature (1)..(10): Xaa can be any naturally occurring amino acid
XXXXXXXXXX

SEQ ID NO: 246 - protein, 10 aa, Artificial sequence
  synthetic sequence
  misc_feature (1)..(10): Xaa can be any naturally occurring amino acid
XXXXXXXXXX

SEQ ID NO: 247 - protein, 10 aa, Artificial sequence
  synthetic sequence
  misc_feature (1)..(10): Xaa can be any naturally occurring amino acid
XXXXXXXXXX

SEQ ID NO: 248 - protein, 10 aa, Artificial sequence
  synthetic sequence
  misc_feature (1)..(10): Xaa can be any naturally occurring amino acid
XXXXXXXXXX

SEQ ID NO: 249 - protein, 10 aa, Artificial sequence
  synthetic sequence
  misc_feature (1)..(10): Xaa can be any naturally occurring amino acid
XXXXXXXXXX

SEQ ID NO: 250 - protein, 10 aa, Artificial sequence
  synthetic sequence
  misc_feature (1)..(10): Xaa can be any naturally occurring amino acid
XXXXXXXXXX

SEQ ID NO: 251 - protein, 10 aa, Artificial sequence
  synthetic sequence
  misc_feature (1)..(10): Xaa can be any naturally occurring amino acid
XXXXXXXXXX

SEQ ID NO: 252 - protein, 10 aa, Artificial sequence
  synthetic sequence
  misc_feature (1)..(10): Xaa can be any naturally occurring amino acid
XXXXXXXXXX

SEQ ID NO: 253 - protein, 10 aa, Artificial sequence
  synthetic sequence
  misc_feature (1)..(10): Xaa can be any naturally occurring amino acid
XXXXXXXXXX

SEQ ID NO: 254 - protein, 10 aa, Artificial sequence
  synthetic sequence
  misc_feature (1)..(10): Xaa can be any naturally occurring amino acid
XXXXXXXXXX

SEQ ID NO: 255 - protein, 10 aa, Artificial sequence
  synthetic sequence
  misc_feature (1)..(10): Xaa can be any naturally occurring amino acid
XXXXXXXXXX

SEQ ID NO: 256 - protein, 10 aa, Artificial sequence
  synthetic sequence
  misc_feature (1)..(10): Xaa can be any naturally occurring amino acid
XXXXXXXXXX

SEQ ID NO: 257 - protein, 10 aa, Artificial sequence
  synthetic sequence
  misc_feature (1)..(10): Xaa can be any naturally occurring amino acid
XXXXXXXXXX

SEQ ID NO: 258 - protein, 10 aa, Artificial sequence
  synthetic sequence
  misc_feature (1)..(10): Xaa can be any naturally occurring amino acid
XXXXXXXXXX

SEQ ID NO: 259 - protein, 10 aa, Artificial sequence
  synthetic sequence
  misc_feature (1)..(10): Xaa can be any naturally occurring amino acid
XXXXXXXXXX

SEQ ID NO: 260 - protein, 10 aa, Artificial sequence
  synthetic sequence
  misc_feature (1)..(10): Xaa can be any naturally occurring amino acid
XXXXXXXXXX

SEQ ID NO: 261 - protein, 10 aa, Artificial sequence
  synthetic sequence
  misc_feature (1)..(10): Xaa can be any naturally occurring amino acid
XXXXXXXXXX

SEQ ID NO: 262 - protein, 10 aa, Artificial sequence
  synthetic sequence
  misc_feature (1)..(10): Xaa can be any naturally occurring amino acid
XXXXXXXXXX

SEQ ID NO: 263 - protein, 10 aa, Artificial sequence
  synthetic sequence
  misc_feature (1)..(10): Xaa can be any naturally occurring amino acid
XXXXXXXXXX

SEQ ID NO: 264 - protein, 10 aa, Artificial sequence
  synthetic sequence
  misc_feature (1)..(10): Xaa can be any naturally occurring amino acid
XXXXXXXXXX

SEQ ID NO: 265 - protein, 10 aa, Artificial sequence
  synthetic sequence
  misc_feature (1)..(10): Xaa can be any naturally occurring amino acid
XXXXXXXXXX

SEQ ID NO: 266 - protein, 10 aa, Artificial sequence
  synthetic sequence
  misc_feature (1)..(10): Xaa can be any naturally occurring amino acid
XXXXXXXXXX

SEQ ID NO: 267 - protein, 10 aa, Artificial sequence
  synthetic sequence
  misc_feature (1)..(10): Xaa can be any naturally occurring amino acid
XXXXXXXXXX

SEQ ID NO: 268 - protein, 10 aa, Artificial sequence
  synthetic sequence
  misc_feature (1)..(10): Xaa can be any naturally occurring amino acid
XXXXXXXXXX

SEQ ID NO: 269 - protein, 10 aa, Artificial sequence
  synthetic sequence
  misc_feature (1)..(10): Xaa can be any naturally occurring amino acid
XXXXXXXXXX

SEQ ID NO: 270 - protein, 10 aa, Artificial sequence
  synthetic sequence
  misc_feature (1)..(10): Xaa can be any naturally occurring amino acid
XXXXXXXXXX

SEQ ID NO: 271 - protein, 9 aa, Artificial sequence
  synthetic sequence
YPYDVPDYA

SEQ ID NO: 272 - protein, 8 aa, Artificial sequence
  synthetic sequence
DYKDDDDK

SEQ ID NO: 273 - protein, 10 aa, Artificial sequence
  synthetic sequence
EQKLISEEDL

SEQ ID NO: 274 - protein, 5 aa, Artificial sequence
  synthetic sequence
HHHHH

SEQ ID NO: 275 - protein, 6 aa, Artificial sequence
  synthetic sequence
HHHHHH

SEQ ID NO: 276 - protein, 10 aa, Artificial sequence
  synthetic sequence
EQKLISEEDL

SEQ ID NO: 277 - protein, 8 aa, Artificial sequence
  synthetic sequence
DYKDDDDK

SEQ ID NO: 278 - protein, 8 aa, Artificial sequence
  synthetic sequence
WSHPQFEK

SEQ ID NO: 279 - protein, 9 aa, Artificial sequence
  synthetic sequence
YPYDVPDYA

SEQ ID NO: 280 - protein, 5 aa, Artificial sequence
  synthetic sequence
RYIRS

SEQ ID NO: 281 - protein, 4 aa, Artificial sequence
  synthetic sequence
FHHT

SEQ ID NO: 282 - protein, 17 aa, Artificial sequence
  synthetic sequence
WEAAAREACCRECCARA

SEQ ID NO: 283 - protein, 5 aa, Artificial sequence
  synthetic sequence
AAAGG

SEQ ID NO: 284 - protein, 5 aa, Artificial sequence
  synthetic sequence
  MISC_FEATURE (1)..(4): The residues from positions 1 to 4 may be repeated 1 to 10 times
GGGGS

SEQ ID NO: 285 - protein, 8 aa, Artificial sequence
  synthetic sequence
  misc_feature (1)..(8): Xaa can be any naturally occurring amino acid
XXXXXXXX

SEQ ID NO: 286 - protein, 7 aa, Artificial sequence
  synthetic sequence
  misc_feature (1)..(7): Xaa can be any naturally occurring amino acid
XXXXXXX

SEQ ID NO: 287 - protein, 5 aa, Artificial sequence
  synthetic sequence
GTLRG

SEQ ID NO: 288 - protein, 5 aa, Artificial sequence
  synthetic sequence
YNQSE

SEQ ID NO: 289 - protein, 5 aa, Artificial sequence
  synthetic sequence
TAADM

SEQ ID NO: 290 - protein, 5 aa, Artificial sequence
  synthetic sequence
AQTTK

SEQ ID NO: 291 - protein, 5 aa, Artificial sequence
  synthetic sequence
VETRP

SEQ ID NO: 292 - protein, 5 aa, Artificial sequence
  synthetic sequence
GDGTF

SEQ ID NO: 293 - protein, 5 aa, Artificial sequence
  synthetic sequence
RNLRG

SEQ ID NO: 294 - protein, 5 aa, Artificial sequence
  synthetic sequence
TAADT

SEQ ID NO: 295 - protein, 5 aa, Artificial sequence
  synthetic sequence
AQITQ

SEQ ID NO: 296 - protein, 5 aa, Artificial sequence
  synthetic sequence
GDRTF

SEQ ID NO: 297 - protein, 276 aa, Homo sapiens [sequence omitted]

SEQ ID NO: 298 - protein, 276 aa, Artificial sequence; identical to SEQ ID NO: 48
  synthetic sequence

SEQ ID NO: 299 - protein, 276 aa, Artificial sequence
  synthetic sequence
GSHSMRYFFTSVSRPGRGEPRFIAVGYVDDTQFVRFDSDAASQRMEPRAPWIEQEGPEYWDGETRKVKAHSQTHRVDLGTLRGCYNQSEAGSHTVQRMYGCDVGSDWRFLRGYHQYAYDGKDYIALKEDLRSWTAADMCAQTTKHKWEAAHVAEQLRAYLEGTCVEWLRRYLENGKETLQRTDAPKTHMTHHAVSDHEATLRCWALSFYPAEITLTWQRDGEDQTQDTELVETRPAGDGTFQKWAAVVVPSGQEQRYTCHVQHEGLPKPLTLRWEP

SEQ ID NO: 300 - protein, 275 aa, Homo sapiens
GSHSMRYFYTSVSRPGRGEPRFIAVGYVDDTQFVRFDSDAASQRMEPRAPWIEQEGPEYWDQETRNVKAQSQTDRVDLGTLRGYYNQSEDGSHTIQIMYGCDVGPDGRFLRGYRQDAYDGKDYIALNEDLRSWTAADMAAQITKRKWEAAHAAEQQRAYLEGTCVEWLRRYLENGKETLQRTDPPKTHMTHHPISDHEATLRCWALGFYPAEITLTWQRDGEDQTQDTELVETRPAGDGTFQKWAAVVVPSGEEQRYTCHVQHEGLPKPLTLRWE

SEQ ID NO: 301 - protein, 275 aa, Artificial sequence
  synthetic sequence
GSHSMRYFYTSVSRPGRGEPRFIAVGYVDDTQFVRFDSDAASQRMEPRAPWIEQEGPEYWDQETRNVKAQSQTDRVDLGTLRGAYNQSEDGSHTIQIMYGCDVGPDGRFLRGYRQDAYDGKDYIALNEDLRSWTAADMAAQITKRKWEAAHAAEQQRAYLEGTCVEWLRRYLENGKETLQRTDPPKTHMTHHPISDHEATLRCWALGFYPAEITLTWQRDGEDQTQDTELVETRPCGDGTFQKWAAVVVPSGEEQRYTCHVQHEGLPKPLTLRWE

SEQ ID NO: 302 - protein, 341 aa, Homo sapiens
GSHSMRYFSTSVSRPGRGEPRFIAVGYVDDTQFVRFDSDAASQRMEPRAPWIEQEGPEYWDEETGKVKAHSQTDRENLRIALRYYNQSEAGSHTLQMMFGCDVGSDGRFLRGYHQYAYDGKDYIALKEDLRSWTAADMAAQITKRKWEAAHVAEQQRAYLEGTCVDGLRRYLENGKETLQRTDPPKTHMTHHPISDHEATLRCWALGFYPAEITLTWQRDGEDQTQDTELVETRPAGDGTFQKWAAVVVPSGEEQRYTCHVQHEGLPKPLTLRWEPSSQPTVPIVGIIAGLVLLGAVITGAVVAAVMWRRNSSDRKGGSYSQAASSDSAQGSDVSLTACKV

SEQ ID NO: 303 - protein, 341 aa, Homo sapiens
GSHSMRYFTTSVSRPGRGEPRFIAVGYVDDTQFVRFDSDAASQRMEPRAPWIEQEGPEYWDRNTRNVKAHSQIDRVDLGTLRGYYNQSEAGSHTIQMMYGCDVGSDGRFLRGYQQDAYDGKDYIALNEDLRSWTAADMAAQITQRKWEAARVAEQLRAYLEGTCVEWLRRYLENGKETLQRTDPPKTHMTHHAVSDHEATLRCWALSFYPAEITLTWQRDGEDQTQDTELVETRPAGDGTFQKWASVVVPSGQEQRYTCHVQHEGLPKPLTLRWEPSSQPTIPIVGIIAGLVLFGAVFAGAVVAAVRWRRKSSDRKGGSYSQAASSDSAQGSDMSLTACKV

SEQ ID NO: 304 - protein, 276 aa, Homo sapiens [sequence omitted]

SEQ ID NO: 305 - protein, 276 aa, Artificial sequence
  synthetic sequence
GSHSMRYFYTSVSRPGRGEPRFISVGYVDDTQFVRFDSDAASPREEPRAPWIEQEGPEYWDRNTQIYKAQAQTDRESLRNLRGAYNQSEAGSHTLQSMYGCDVGPDGRLLRGHDQYAYDGKDYIALNEDLRSWTAADTAAQITQRKWEAAREAEQRRAYLEGECVEWLRRYLENGKDKLERADPPKTHVTHHPISDHEATLRCWALGFYPAEITLTWQRDGEDQTQDTELVETRPCGDRTFQKWAAVVVPSGEEQRYTCHVQHEGLPKPLTLRWEP

SEQ ID NO: 306 - protein, 276 aa, Artificial sequence
  synthetic sequence
GSHSMRYFYTSVSRPGRGEPRFISVGYVDDTQFVRFDSDAASPREEPRAPWIEQEGPEYWDRNTQIYKAQAQTDRESLRNLRGCYNQSEAGSHTLQSMYGCDVGPDGRLLRGHDQYAYDGKDYIALNEDLRSWTAADTCAQITQRKWEAAREAEQRRAYLEGECVEWLRRYLENGKDKLERADPPKTHVTHHPISDHEATLRCWALGFYPAEITLTWQRDGEDQTQDTELVETRPAGDRTFQKWAAVVVPSGEEQRYTCHVQHEGLPKPLTLRWEP

SEQ ID NO: 307 - protein, 276 aa, Homo sapiens; identical to SEQ ID NO: 219

SEQ ID NO: 308 - protein, 276 aa, Homo sapiens
CSHSMRYFDTAVSRPGRGEPRFISVGYVDDTQFVRFDSDAASPRGEPRAPWVEQEGPEYWDRETQNYKRQAQADRVSLRNLRGAYNQSEDGSHTLQRMYGCDLGPDGRLLRGYDQSAYDGKDYIALNEDLRSWTAADTAAQITQRKLEAARAAEQLRAYLEGTCVEWLRRYLENGKETLQRAEPPKTHVTHHPLSDHEATLRCWALGFYPAEITLTWQRDGEDQTQDTELVETRPCGDGTFQKWAAVVVPSGQEQRYTCHMQHEGLQEPLTLSWEP

SEQ ID NO: 309 - protein, 246 aa, Artificial sequence
  synthetic sequence
  MISC_FEATURE (78)..(79): Amino acid cluster 1 is present between the residues at positions 78 and 79.
  MISC_FEATURE (79)..(79): The cysteine residue forms a disulfide bond between the alpha1 and alpha2-1 helices.
  MISC_FEATURE (79)..(80): Amino acid cluster 2 is present between the residues at positions 79 and 80.
  MISC_FEATURE (123)..(124): Amino acid cluster 3 is present between the residues at positions 123 and 124.
  MISC_FEATURE (124)..(124): The cysteine residue at position 124 forms a disulfide bond between the alpha1 and alpha2-1 helices
  MISC_FEATURE (124)..(125): Amino acid cluster 4 is present between the residues at positions 124 and 125.
  MISC_FEATURE (210)..(211): Amino acid cluster 5 is present between the residues at positions 210 and 211.
  MISC_FEATURE (211)..(211): The cysteine residue forms a disulfide bond with the beta2M polypeptide cysteine at position 12.
  MISC_FEATURE (211)..(212): Amino acid cluster 6 is present between the residues at positions 211 and 212.
  MISC_FEATURE (212)..(213): Amino acid cluster 6 is present between the residues at positions 211 and 212.
GSHSMRYFFTSVSRPGRGEPRFIAVGYVDDTQFVRFDSDAASQRMEPRAPWIEQEGPEYWDGETRKVKAHSQTHRVDLCAGSHTVQRMYGCDVGSDWRFLRGYHQYAYDGKDYIALKEDLRSWCHKWEAAHVAEQLRAYLEGTCVEWLRRYLENGKETLQRTDAPKTHMTHHAVSDHEATLRCWALSFYPAEITLTWQRDGEDQTQDTELCQKWAAVVVPSGQEQRYTCHVQHEGLPKPLTLRWEP

SEQ ID NO: 310 - protein, 99 aa, Artificial sequence [sequence omitted]

SEQ ID NO: 311 - protein, 99 aa, Artificial sequence
  synthetic sequence
IQRTPKIQVYSCHPAENGKSNFLNCYVSGFHPSDIEVDLLKNGERIEKVEHSDLSFSKDWSFYLLYYTEFTPTEKDEYACRVNHVTLSQPKIVKWDRDM

SEQ ID NO: 312 - protein, 276 aa, Artificial sequence
  synthetic sequence
GSHSMRYFFTSVSRPGRGEPRFIAVGYVDDTQFVRFDSDAASQRMEPRAPWIEQEGPEYWDGETRKVKAHSQTHRVDLGTLRGYYNQSEAGSHTVQRMYGCDVGSDWRFLRGYHQYAYDGKDYIALKEDLRSWTAADMAAQTTKHKWEAAHVAEQLRAYLEGTCVEWLRRYLENGKETLQRTDAPKTHMTHHAVSDHEATLRCWALSFYPAEITLTWQRDGEDQTQDTELVETRPCGDGTFQKWAAVVVPSGQEQRYTCHVQHEGLPKPLTLRWEP

SEQ ID NO: 313 - protein, 275 aa, Artificial sequence; identical to SEQ ID NO: 46
  synthetic sequence

SEQ ID NO: 314 - protein, 99 aa, Artificial sequence; identical to SEQ ID NO: 311
  synthetic sequence

SEQ ID NO: 315 - protein, 10 aa, Artificial sequence
  synthetic sequence
  MISC_FEATURE (6)..(10): The amino acids from positions 6 to 10 may be repeated 1, 2, 3, 4, 5, 6, 7, 8, or 9 times
GCGGSGGGGS

SEQ ID NO: 316 - protein, 20 aa, Artificial sequence
  synthetic sequence
GCGGSGGGGSGGGGSGGGGS

SEQ ID NO: 317 - protein, 15 aa, Artificial sequence
  synthetic sequence
GCGGSGGGGSGGGGS

SEQ ID NO: 318 - protein, 5 aa, Artificial sequence
  synthetic sequence
GCGGS

SEQ ID NO: 319 - protein, 10 aa, Artificial sequence
  synthetic sequence
  MISC_FEATURE (6)..(10): The amino acids at positions 6 to 10 may be repeated 1 to 10 times
GCGGSGGGGS

SEQ ID NO: 320 - protein, 15 aa, Artificial sequence
  synthetic sequence
GCGGSGGGGSGGGGS

SEQ ID NO: 321 - protein, 20 aa, Artificial sequence
  synthetic sequence
GCGGSGGGGSGGGGSGGGGS

SEQ ID NO: 322 - protein, 25 aa, Artificial sequence
  synthetic sequence
GCGGSGGGGSGGGGSGGGGSGGGGS

SEQ ID NO: 323 - protein, 30 aa, Artificial sequence
  synthetic sequence
GCGGSGGGGSGGGGSGGGGSGGGGSGGGGS

SEQ ID NO: 324 - protein, 35 aa, Artificial sequence
  synthetic sequence
GCGGSGGGGSGGGGSGGGGSGGGGSGGGGSGGGGS

SEQ ID NO: 325 - protein, 40 aa, Artificial sequence
  synthetic sequence
GCGGSGGGGSGGGGSGGGGSGGGGSGGGGSGGGGSGGGGS

SEQ ID NO: 326 - protein, 45 aa, Artificial sequence
  synthetic sequence
GCGGSGGGGSGGGGSGGGGSGGGGSGGGGSGGGGSGGGGSGGGGS

SEQ ID NO: 327 - protein, 50 aa, Artificial sequence
  synthetic sequence
GCGGSGGGGSGGGGSGGGGSGGGGSGGGGSGGGGSGGGGSGGGGSGGGGS

SEQ ID NO: 328 - protein, 55 aa, Artificial sequence
  synthetic sequence
GCGGSGGGGSGGGGSGGGGSGGGGSGGGGSGGGGSGGGGSGGGGSGGGGSGGGGS

SEQ ID NO: 329 - protein, 5 aa, Artificial sequence
  synthetic sequence
CGGGS

SEQ ID NO: 330 - protein, 10 aa, Artificial sequence
  synthetic sequence
  MISC_FEATURE (6)..(10): The amino acids at positions 6 to 10 can be repeated 1 to 10 times
CGGGSGGGGS

SEQ ID NO: 331 - protein, 10 aa, Artificial sequence
  synthetic sequence
CGGGSGGGGS

SEQ ID NO: 332 - protein, 15 aa, Artificial sequence
  synthetic sequence
CGGGSGGGGSGGGGS

SEQ ID NO: 333 - protein, 20 aa, Artificial sequence
  synthetic sequence
CGGGSGGGGSGGGGSGGGGS

SEQ ID NO: 334 - protein, 25 aa, Artificial sequence
  synthetic sequence
CGGGSGGGGSGGGGSGGGGSGGGGS

SEQ ID NO: 335 - protein, 30 aa, Artificial sequence
  synthetic sequence
CGGGSGGGGSGGGGSGGGGSGGGGSGGGGS

SEQ ID NO: 336 - protein, 35 aa, Artificial sequence
  synthetic sequence
CGGGSGGGGSGGGGSGGGGSGGGGSGGGGSGGGGS

SEQ ID NO: 337 - protein, 40 aa, Artificial sequence
  synthetic sequence
CGGGSGGGGSGGGGSGGGGSGGGGSGGGGSGGGGSGGGGS

SEQ ID NO: 338 - protein, 45 aa, Artificial sequence
  synthetic sequence
CGGGSGGGGSGGGGSGGGGSGGGGSGGGGSGGGGSGGGGSGGGGS

SEQ ID NO: 339 - protein, 50 aa, Artificial sequence
  synthetic sequence
CGGGSGGGGSGGGGSGGGGSGGGGSGGGGSGGGGSGGGGSGGGGSGGGGS

SEQ ID NO: 340 - protein, 55 aa, Artificial sequence
  synthetic sequence
CGGGSGGGGSGGGGSGGGGSGGGGSGGGGSGGGGSGGGGSGGGGSGGGGSGGGGS

SEQ ID NO: 341 - protein, 276 aa, Artificial sequence
  synthetic sequence
GSHSMRYFFTSVSRPGRGEPRFIAVGYVDDTQFVRFDSDAASQRMEPRAPWIEQEGPEYWDGETRKVKAHSQTHRVDLGTLRGCYNQSEAGSHTVQRMYGCDVGSDWRFLRGYHQYAYDGKDYIALKEDLRSWTAADMAAQTTKHKWEAAHVAEQLRAYLEGTCVEWLRRYLENGKETLQRTDAPKTHMTHHAVSDHEATLRCWALSFYPAEITLTWQRDGEDQTQDTELVETRPCGDGTFQKWAAVVVPSGQEQRYTCHVQHEGLPKPLTLRWEP

SEQ ID NO: 342 - protein, 10 aa, Artificial sequence
  synthetic sequence
  MISC_FEATURE (6)..(10): The residues from positions 6 to 10 may be repeated 1 to 10 times
GCGGSGGGGS

SEQ ID NO: 343 - protein, 275 aa, Artificial sequence
  synthetic sequence
GSHSMRYFFTSVSRPGRGEPRFIAVGYVDDTQFVRFDSDAASQKMEPRAPWIEQEGPEYWDQETRNMKAHSQTDRANLGTLRGCYNQSEDGSHTIQIMYGCDVGPDGRFLRGYRQDAYDGKDYIALNEDLRSWTAADMAAQITKRKWEAVHAAEQRRVYLEGRCVDGLRRYLENGKETLQRTDPPKTHMTHHPISDHEATLRCWALGFYPAEITLTWQRDGEDQTQDTELVETRPCGDGTFQKWAAVVVPSGEEQRYTCHVQHEGLPKPLTLRWE

SEQ ID NO: 344 - protein, 275 aa, Artificial sequence
  synthetic sequence
GSHSMRYFYTSVSRPGRGEPRFIAVGYVDDTQFVRFDSDAASQRMEPRAPWIEQEGPEYWDQETRNVKAQSQTDRVDLGTLRGCYNQSEDGSHTIQIMYGCDVGPDGRFLRGYRQDAYDGKDYIALNEDLRSWTAADMAAQITKRKWEAAHAAEQQRAYLEGRCVEWLRRYLENGKETLQRTDPPKTHMTHHPISDHEATLRCWALGFYPAEITLTWQRDGEDQTQDTELVETRPCGDGTFQKWAAVVVPSGEEQRYTCHVQHEGLPKPLTLRWE

SEQ ID NO: 345 - protein, 275 aa, Artificial sequence
  synthetic sequence
GSHSMRYFSTSVSRPGRGEPRFIAVGYVDDTQFVRFDSDAASQRMEPRAPWIEQEGPEYWDEETGKVKAHSQTDRENLRIALRCYNQSEAGSHTLQMMFGCDVGSDGRFLRGYHQYAYDGKDYIALKEDLRSWTAADMAAQITQRKWEAARVAEQLRAYLEGTCVDGLRRYLENGKETLQRTDPPKTHMTHHPISDHEATLRCWALGFYPAEITLTWQRDGEDQTQDTELVETRPCGDGTFQKWAAVVVPSGEEQRYTCHVQHEGLPKPLTLRWE

SEQ ID NO: 346 - protein, 275 aa, Artificial sequence
  synthetic sequence
GSHSMRYFSTSVSRPGRGEPRFIAVGYVDDTQFVRFDSDAASQRMEPRAPWIEQEGPEYWDEETGKVKAHSQTDRENLRIALRCYNQSEAGSHTLQMMFGCDVGSDGRFLRGYHQYAYDGKDYIALKEDLRSWTAADMAAQITKRKWEAAHVAEQQRAYLEGTCVDGLRRYLENGKETLQRTDPPKTHMTHHPISDHEATLRCWALGFYPAEITLTWQRDGEDQTQDTELVETRPCGDGTFQKWAAVVVPSGEEQRYTCHVQHEGLPKPLTLRWE

SEQ ID NO: 347 - protein, 275 aa, Artificial sequence
  synthetic sequence
GSHSMRYFSTSVSRPGRGEPRFIAVGYVDDTQFVRFDSDAASQRMEPRAPWIEQEGPEYWDEETGKVKAQSQTDRENLRIALRCYNQSEAGSHTLQMMFGCDVGSDGRFLRGYHQYAYDGKDYIALKEDLRSWTAADMAAQITKRKWEAAHVAEQQRAYLEGTCVDGLRRYLENGKETLQRTDPPKTHMTHHPISDHEATLRCWALGFYPAEITLTWQRDGEDQTQDTELVETRPCGDGTFQKWAAVVVPSGEEQRYTCHVQHEGLPKPLTLRWE

SEQ ID NO: 348 - protein, 275 aa, Artificial sequence
  synthetic sequence
GSHSMRYFTTSVSRPGRGEPRFIAVGYVDDTQFVRFDSDAASQRMEPRAPWIEQEGPEYWDRNTRNVKAHSQIDRVDLGTLRGCYNQSEAGSHTIQMMYGCDVGSDGRFLRGYQQDAYDGKDYIALNEDLRSWTAADMAAQITQRKWEAARVAEQLRAYLEGTCVEWLRRYLENGKETLQRTDPPKTHMTHHAVSDHEATLRCWALSFYPAEITLTWQRDGEDQTQDTELVETRPCGDGTFQKWASVVVPSGQEQRYTCHVQHEGLPKPLTLRWE

SEQ ID NO: 349 - protein, 275 aa, Artificial sequence
  synthetic sequence
GSHSMRYFYTSVSRPGRGEPRFIAVGYVDDTQFVRFDSDAASQRMEPRAPWIEQEGPEYWDRNTRKVKAQSQTDRVDLGTLRGCYNQSEDGSHTIQRMYGCDVGPDGRFLRGYQQDAYDGKDYIALNEDLRSWTAADMAAQITQRKWETAHEAEQWRAYLEGTCVEWLRRYLENGKETLQRTDAPKTHMTHHAVSDHEATLRCWALSFYPAEITLTWQRDGEDQTQDTELVETRPCGDGTFQKWASVVVPSGQEQRYTCHVQHEGLPKPLTLRWE

SEQ ID NO: 350 - protein, 276 aa, Artificial sequence
  synthetic sequence
GSHSMRYFYTSVSRPGRGEPRFISVGYVDDTQFVRFDSDAASPREEPRAPWIEQEGPEYWDRNTQIYKAQAQTDRESLRNLRGCYNQSEAGSHTLQSMYGCDVGPDGRLLRGHDQYAYDGKDYIALNEDLRSWTAADTAAQITQRKWEAAREAEQRRAYLEGECVEWLRRYLENGKDKLERADPPKTHVTHHPISDHEATLRCWALGFYPAEITLTWQRDGEDQTQDTELVETRPCGDRTFQKWAAVVVPSGEEQRYTCHVQHEGLPKPLTLRWEP

SEQ ID NO: 351 - protein, 275 aa, Artificial sequence
  synthetic sequence
GSHSMRYFDTAMSRPGRGEPRFISVGYVDDTQFVRFDSDAASPREEPRAPWIEQEGPEYWDRNTQIFKTNTQTDRESLRNLRGCYNQSEAGSHTLQSMYGCDVGPDGRLLRGHNQYAYDGKDYIALNEDLRSWTAADTAAQITQRKWEAARVAEQDRAYLEGTCVEWLRRYLENGKDTLERADPPKTHVTHHPISDHEATLRCWALGFYPAEITLTWQRDGEDQTQDTELVETRPCGDRTFQKWAAVVVPSGEEQRYTCHVQHEGLPKPLTLRWE

SEQ ID NO: 352 - protein, 275 aa, Artificial sequence
  synthetic sequence
GSHSMRYFYTAMSRPGRGEPRFIAVGYVDDTQFVRFDSDAASPRMAPRAPWIEQEGPEYWDRNTQISKTNTQTYRESLRNLRGCYNQSEAGSHIIQRMYGCDVGPDGRLLRGYDQSAYDGKDYIALNEDLSSWTAADTAAQITQRKWEAAREAEQLRAYLEGLCVEWLRRYLENGKETLQRADPPKTHVTHHPISDHEATLRCWALGFYPAEITLTWQRDGEDQTQDTELVETRPCGDRTFQKWAAVVVPSGEEQRYTCHVQHEGLPKPLTLRWE

SEQ ID NO: 353 - protein, 275 aa, Artificial sequence
  synthetic sequence
GSHSMRYFYTSVSRPGRGEPRFISVGYVDDTQFVRFDSDAASPREEPRAPWIEQEGPEYWDRNTQICKTNTQTYRENLRTALRCYNQSEAGSHTLQRMYGCDVGPDGRLLRGHNQFAYDGKDYIALNEDLSSWTAADTAAQITQRKWEAARVAEQLRTYLEGTCVEWLRRYLENGKETLQRADPPKTHVTHHPISDHEATLRCWALGFYPAEITLTWQRDGEDQTQDTELVETRPCGDRTFQKWAAVVVPSGEEQRYTCHVQHEGLPKPLTLRWE

SEQ ID NO: 354 - protein, 275 aa, Artificial sequence
  synthetic sequence
GSHSMRYFHTAMSRPGRGEPRFITVGYVDDTLFVRFDSDATSPRKEPRAPWIEQEGPEYWDRETQISKTNTQTYRESLRNLRGCYNQSEAGSHTLQRMYGCDVGPDGRLLRGHNQYAYDGKDYIALNEDLRSWTAADTAAQISQRKLEAARVAEQLRAYLEGECVEWLRRYLENGKDKLERADPPKTHVTHHPISDHEATLRCWALGFYPAEITLTWQRDGEDQTQDTELVETRPCGDRTFQKWAAVVVPSGEEQRYTCHVQHEGLPKPLTLRWE

SEQ ID NO: 355 - protein, 275 aa, Artificial sequence
  synthetic sequence
GSHSMRYFYTAMSRPGRGEPRFIAVGYVDDTQFVRFDSDAASPRMAPRAPWIEQEGPEYWDRETQKYKRQAQTDRVSLRNLRGCYNQSEAGSHTLQRMYGCDVGPDGRLLRGHDQSAYDGKDYIALNEDLSSWTAADTAAQITQRKWEAAREAEQWRAYLEGLCVEWLRRYLENGKETLQRADPPKTHVTHHPISDHEATLRCWALGFYPAEITLTWQRDGEDQTQDTELVETRPCGDRTFQKWAAVVVPSGEEQRYTCHVQHEGLPKPLTLRWE

SEQ ID NO: 356 - protein, 275 aa, Artificial sequence
  synthetic sequence
GSHSMRYFYTAMSRPGRGEPRFIAVGYVDDTQFVRFDSDAASPRTEPRAPWIEQEGPEYWDRNTQIFKTNTQTYRENLRIALRCYNQSEAGSHIIQRMYGCDLGPDGRLLRGHDQSAYDGKDYIALNEDLSSWTAADTAAQITQRKWEAARVAEQLRAYLEGLCVEWLRRYLENGKETLQRADPPKTHVTHHPVSDHEATLRCWALGFYPAEITLTWQRDGEDQTQDTELVETRPCGDRTFQKWAAVVVPSGEEQRYTCHVQHEGLPKPLTLRWE

SEQ ID NO: 357 - protein, 276 aa, Artificial sequence
  synthetic sequence
CSHSMRYFDTAVSRPGRGEPRFISVGYVDDTQFVRFDSDAASPRGEPRAPWVEQEGPEYWDRETQNYKRQAQADRVSLRNLRGCYNQSEDGSHTLQRMYGCDLGPDGRLLRGYDQSAYDGKDYIALNEDLRSWTAADTAAQITQRKLEAARAAEQLRAYLEGTCVEWLRRYLENGKETLQRAEPPKTHVTHHPLSDHEATLRCWALGFYPAEITLTWQRDGEDQTQDTELVETRPCGDGTFQKWAAVVVPSGQEQRYTCHMQHEGLQEPLTLSWEP

SEQ ID NO: 358 - protein, 276 aa, Artificial sequence
  synthetic sequence
CSHSMKYFFTSVSRPGRGEPRFISVGYVDDTQFVRFDSDAASPRGEPRAPWVEQEGPEYWDRETQKYKRQAQTDRVSLRNLRGCYNQSEAGSHTLQWMCGCDLGPDGRLLRGYDQYAYDGKDYIALNEDLRSWTAADTAAQITQRKWEAAREAEQRRAYLEGTCVEWLRRYLENGKETLQRAEHPKTHVTHHPVSDHEATLRCWALGFYPAEITLTWQWDGEDQTQDTELVETRPCGDGTFQKWAAVMVPSGEEQRYTCHVQHEGLPEPLTLRWEP

SEQ ID NO: 359 - protein, 276 aa, Artificial sequence
  synthetic sequence
GSHSMRYFYTAVSRPGRGEPHFIAVGYVDDTQFVRFDSDAASPRGEPRAPWVEQEGPEYWDRETQKYKRQAQTDRVSLRNLRGCYNQSEARSHIIQRMYGCDVGPDGRLLRGYDQYAYDGKDYIALNEDLRSWTAADTAAQITQRKWEAAREAEQLRAYLEGLCVEWLRRYLKNGKETLQRAEHPKTHVTHHPVSDHEATLRCWALGFYPAEITLTWQWDGEDQTQDTELVETRPCGDGTFQKWAAVVVPSGEEQRYTCHVQHEGLPEPLTLRWEP

SEQ ID NO: 360 - protein, 276 aa, Artificial sequence
  synthetic sequence
GSHSMRYFYTAVSRPGRGEPHFIAVGYVDDTQFVRFDSDAASPRGEPRAPWVEQEGPEYWDRETQKYKRQAQTDRVSLRNLRGCYNQSEAGSHIIQRMYGCDVGPDGRLLRGYDQYAYDGKDYIALNEDLRSWTAADTAAQITQRKWEAAREAEQLRAYLEGLCVEWLRRYLKNGKETLQRAEHPKTHVTHHPVSDHEATLRCWALGFYPAEITLTWQWDGEDQTQDTELVETRPCGDGTFQKWAAVVVPSGEEQRYTCHVQHEGLPEPLTLRWEP

SEQ ID NO: 361 - protein, 276 aa, Artificial sequence
  synthetic sequence
GSHSMRYFSTSVSWPGRGEPRFIAVGYVDDTQFVRFDSDAASPRGEPREPWVEQEGPEYWDRETQKYKRQAQADRVNLRKLRGCYNQSEDGSHTLQRMFGCDLGPDGRLLRGYNQFAYDGKDYIALNEDLRSWTAADTAAQITQRKWEAAREAEQRRAYLEGTCVEWLRRYLENGKETLQRAEHPKTHVTHHPVSDHEATLRCWALGFYPAEITLTWQWDGEDQTQDTELVETRPCGDGTFQKWAAVVVPSGEEQRYTCHVQHEGLPEPLTLRWKP

SEQ ID NO: 362 - protein, 276 aa, Artificial sequence
  synthetic sequence
CSHSMRYFDTAVSRPGRGEPRFISVGYVDDTQFVRFDSDAASPRGEPRAPWVEQEGPEYWDRETQKYKRQAQADRVNLRKLRGCYNQSEDGSHTLQWMYGCDLGPDGRLLRGYDQSAYDGKDYIALNEDLRSWTAADTAAQITQRKWEAAREAEQWRAYLEGTCVEWLRRYLENGKETLQRAEHPKTHVTHHPVSDHEATLRCWALGFYPAEITLTWQRDGEDQTQDTELVETRPCGDGTFQKWAAVVVPSGEEQRYTCHVQHEGLPEPLTLRWEP

SEQ ID NO: 363 - protein, 276 aa, Artificial sequence
  synthetic sequence
CSHSMRYFYTAVSRPGRGEPRFIAVGYVDDTQFVQFDSDAASPRGEPRAPWVEQEGPEYWDRETQKYKRQAQTDRVSLRNLRGCYNQSEAGSHTLQRMYGCDLGPDGRLLRGYNQFAYDGKDYIALNEDLRSWTAADTAAQITQRKWEAARTAEQLRAYLEGTCVEWLRRYLENGKKTLQRAEHPKTHVTHHPVSDHEATLRCWALGFYPAEITLTWQRDGEDQTQDTELVETRPCGDGTFQKWAAVVVPSGEEQRYTCHVQHEGLPEPLTLRWGP

SEQ ID NO: 364 - protein, 276 aa, Artificial sequence
  synthetic sequence
CSHSMRYFYTAVSRPGRGEPHFIAVGYVDDTQFVRFDSDAASPRGEPRAPWVEQEGPEYWDRETQNYKRQAQTDRVNLRKLRGCYNQSEAGSHIIQRMYGCDLGPDGRLLRGHDQLAYDGKDYIALNEDLRSWTAADTAAQITQRKWEAAREAEQLRAYLEGTCVEWLRRYLENGKETLQRAEHPKTHVTHHPVSDHEATLRCWALGFYPAEITLTWQRDGEDQTQDTELVETRPCGDGTFQKWAAVVVPSGEEQRYTCHVQHEGLPEPLTLRWEP

SEQ ID NO: 365 - protein, 223 aa, Artificial sequence
  synthetic sequence
PPCPSCPAPEFLGGPSVFLFPPKPKDTLMISRTPEVTCVVVDVSQEDPEVQFNWYVDGVEVHNAKTKPREEQFNSTYRVVSVLTVLHQDWLNGKEYKCKVSNKGLPSSIEKTISKAKGQPREPQVYTLPPSQEEMTKNQVSLTCLVKGFYPSDIAVEWESNGQPENNYKTTPPVLDSDGSFFLYSRLTVDKSRWQEGNVFSCSVMHEALHNHYTQKSLSLSPG

SEQ ID NO: 366 - protein, 7 aa, Artificial sequence
  synthetic sequence
  MISC_FEATURE (1)..(2): The amino acids from positions 1 to 2 may be repeated at least once
  MISC_FEATURE (3)..(7): The amino acids at positions 3 to 7 may be repeated at least once
GSGSGGS

SEQ ID NO: 367 - protein, 4 aa, Artificial sequence
  synthetic sequence
  MISC_FEATURE (1)..(4): The amino acids at positions 1 to 4 may be repeated at least once
GGGS

SEQ ID NO: 368 - protein, 4 aa, Artificial sequence
  synthetic sequence
GGSG

SEQ ID NO: 369 - protein, 5 aa, Artificial sequence
  synthetic sequence
GGSGG

SEQ ID NO: 370 - protein, 5 aa, Artificial sequence
  synthetic sequence
GSGSG

SEQ ID NO: 371 - protein, 5 aa, Artificial sequence
  synthetic sequence
GSGGG

SEQ ID NO: 372 - protein, 5 aa, Artificial sequence
  synthetic sequence
GGGSG

SEQ ID NO: 373 - protein, 5 aa, Artificial sequence
  synthetic sequence
GSSSG

SEQ ID NO: 374 - protein, 5 aa, Artificial sequence
  synthetic sequence
GSSSS

SEQ ID NO: 375 - protein, 20 aa, Artificial sequence
  synthetic sequence
GSSSSGSSSSGSSSSGSSSS

SEQ ID NO: 376 - protein, 25 aa, Artificial sequence
  synthetic sequence
GSSSSGSSSSGSSSSGSSSSGSSSS

SEQ ID NO: 377 - protein, 5 aa, Artificial sequence
  synthetic sequence
GGGGS

SEQ ID NO: 378 - protein, 10 aa, Artificial sequence
  synthetic sequence
GGGGSGGGGS

SEQ ID NO: 379 - protein, 15 aa, Artificial sequence
  synthetic sequence
GGGGSGGGGSGGGGS

SEQ ID NO: 380 - protein, 20 aa, Artificial sequence
  synthetic sequence
GGGGSGGGGSGGGGSGGGGS

SEQ ID NO: 381 - protein, 25 aa, Artificial sequence
  synthetic sequence
GGGGSGGGGSGGGGSGGGGSGGGGS

SEQ ID NO: 382 - protein, 30 aa, Artificial sequence
  synthetic sequence
GGGGSGGGGSGGGGSGGGGSGGGGSGGGGS

SEQ ID NO: 383 - protein, 35 aa, Artificial sequence
  synthetic sequence
GGGGSGGGGSGGGGSGGGGSGGGGSGGGGSGGGGS

SEQ ID NO: 384 - protein, 40 aa, Artificial sequence
  synthetic sequence
GGGGSGGGGSGGGGSGGGGSGGGGSGGGGSGGGGSGGGGS

SEQ ID NO: 385 - protein, 45 aa, Artificial sequence
  synthetic sequence
GGGGSGGGGSGGGGSGGGGSGGGGSGGGGSGGGGSGGGGSGGGGS

SEQ ID NO: 386 - protein, 50 aa, Artificial sequence
  synthetic sequence
GGGGSGGGGSGGGGSGGGGSGGGGSGGGGSGGGGSGGGGSGGGGSGGGGS

SEQ ID NO: 387 - protein, 5 aa, Artificial sequence
  synthetic sequence
AAAGG

SEQ ID NO: 388 - protein, 8 aa, Artificial sequence
  synthetic sequence
LEVLFQGP

SEQ ID NO: 389 - protein, 7 aa, Artificial sequence
  synthetic sequence
ENLYTQS

SEQ ID NO: 390 - protein, 5 aa, Artificial sequence
  synthetic sequence
DDDDK

SEQ ID NO: 391 - protein, 4 aa, Artificial sequence
  synthetic sequence
LVPR

SEQ ID NO: 392 - protein, 22 aa, Artificial sequence
  synthetic sequence
GSGATNFSLLKQAGDVEENPGP

SEQ ID NO: 393 - protein, 9 aa, Artificial sequence
  synthetic sequence
  MISC_FEATURE (6)..(10): The amino acids from positions 6 to 10 may be repeated 1, 2, or 3 times.
GCGGGGGGS

SEQ ID NO: 394 - protein, 6 aa, Artificial sequence
  synthetic sequence
CHYSEL

SEQ ID NO: 395 - protein, 9 aa, Artificial sequence
  synthetic sequence
GILGFVFTL

SEQ ID NO: 396 - protein, 9 aa, Artificial sequence
  synthetic sequence
HPVGEADYF

SEQ ID NO: 397 - protein, 276 aa, Artificial sequence
  synthetic sequence
CSHSMRYFDTAVSRPGRGEPRFISVGYVDDTQFVRFDSDAASPRGEPRAPWVEQEGPEYWDRETQNYKRQAQADRVSLRNLRGCYNQSEDGSHTLQRMYGCDLGPDGRLLRGYDQSAYDGKDYIALNEDLRSWTAADTCAQITQRKLEAARAAEQLRAYLEGTCVEWLRRYLENGKETLQRAEPPKTHVTHHPLSDHEATLRCWALGFYPAEITLTWQRDGEDQTQDTELVETRPAGDGTFQKWAAVVVPSGQEQRYTCHMQHEGLQEPLTLSWEP

SEQ ID NO: 398 - protein, 10 aa, Artificial sequence
  synthetic sequence
GCGGSGGGGS

SEQ ID NO: 399 - protein, 7 aa, Homo sapiens
  misc_feature (1)..(7): Xaa can be any naturally occurring amino acid
XXXXXXX

SEQ ID NO: 400 - protein, 7 aa, Homo sapiens
  misc_feature (1)..(7): Xaa can be any naturally occurring amino acid
XXXXXXX

SEQ ID NO: 401 - protein, 7 aa, Homo sapiens
  misc_feature (1)..(7): Xaa can be any naturally occurring amino acid
XXXXXXX

SEQ ID NO: 402 - protein, 7 aa, Homo sapiens
  misc_feature (1)..(7): Xaa can be any naturally occurring amino acid
XXXXXXX

SEQ ID NO: 403 - protein, 7 aa, Homo sapiens
  misc_feature (1)..(7): Xaa can be any naturally occurring amino acid
XXXXXXX

SEQ ID NO: 404 - protein, 276 aa, Artificial sequence
  synthetic sequence
CSHSMRYFDTAVSRPGRGEPRFISVGYVDDTQFVRFDSDAASPRGEPRAPWVEQEGPEYWDRETQKYKRQAQADRVSLRNLRGCYNQSEDGSHTLQRMSGCDLGPDGRLLRGYDQSAYDGKDYIALNEDLRSWTAADTAAQITQRKLEAARAAEQLRAYLEGTCVEWLRRYLENGKETLQRAEPPKTHVTHHPLSDHEATLRCWALGFYPAEITLTWQRDGEDQTQDTELVETRPCGDGTFQKWAAVVVPSGQEQRYTCHMQHEGLQEPLTLSWEP

SEQ ID NO: 405 - protein, 7 aa, Artificial sequence
  synthetic sequence
  misc_feature (1)..(7): Xaa can be any naturally occurring amino acid
XXXXXXX

SEQ ID NO: 406 - protein, 7 aa, Artificial sequence
  synthetic sequence
  misc_feature (1)..(7): Xaa can be any naturally occurring amino acid
XXXXXXX

SEQ ID NO: 407 - protein, 7 aa, Artificial sequence
  synthetic sequence
  misc_feature (1)..(7): Xaa can be any naturally occurring amino acid
XXXXXXX

SEQ ID NO: 408 - protein, 7 aa, Artificial sequence
  synthetic sequence
  misc_feature (1)..(7): Xaa can be any naturally occurring amino acid
XXXXXXX

SEQ ID NO: 409 - protein, 7 aa, Artificial sequence
  synthetic sequence
  misc_feature (1)..(7): Xaa can be any naturally occurring amino acid
XXXXXXX

SEQ ID NO: 410 - protein, 7 aa, Homo sapiens
  misc_feature (1)..(7): Xaa can be any naturally occurring amino acid
XXXXXXX

SEQ ID NO: 411 - protein, 7 aa, Homo sapiens
  misc_feature (1)..(7): Xaa can be any naturally occurring amino acid
XXXXXXX

SEQ ID NO: 412 - protein, 7 aa, Homo sapiens
  misc_feature (1)..(7): Xaa can be any naturally occurring amino acid
XXXXXXX

SEQ ID NO: 413 - protein, 7 aa, Homo sapiens
  misc_feature (1)..(7): Xaa can be any naturally occurring amino acid
XXXXXXX

SEQ ID NO: 414 - protein, 7 aa, Homo sapiens
  misc_feature (1)..(7): Xaa can be any naturally occurring amino acid
XXXXXXX

SEQ ID NO: 415 - protein, 7 aa, Homo sapiens
  misc_feature (1)..(7): Xaa can be any naturally occurring amino acid
XXXXXXX

SEQ ID NO: 416 - protein, 7 aa, Homo sapiens
  misc_feature (1)..(7): Xaa can be any naturally occurring amino acid
XXXXXXX

SEQ ID NO: 417 - protein, 7 aa, Homo sapiens
  misc_feature (1)..(7): Xaa can be any naturally occurring amino acid
XXXXXXX

SEQ ID NO: 418 - protein, 7 aa, Homo sapiens
  misc_feature (1)..(7): Xaa can be any naturally occurring amino acid
XXXXXXX

SEQ ID NO: 419 - protein, 7 aa, Artificial sequence
  synthetic sequence
  misc_feature (1)..(7): Xaa can be any naturally occurring amino acid
XXXXXXX

SEQ ID NO: 420 - protein, 7 aa, Artificial sequence
  synthetic sequence
  misc_feature (1)..(7): Xaa can be any naturally occurring amino acid
XXXXXXX

SEQ ID NO: 421 - protein, 7 aa, Artificial sequence
  synthetic sequence
  misc_feature (1)..(7): Xaa can be any naturally occurring amino acid
XXXXXXX

SEQ ID NO: 422 - protein, 7 aa, Artificial sequence
  synthetic sequence
  misc_feature (1)..(7): Xaa can be any naturally occurring amino acid
XXXXXXX

SEQ ID NO: 423 - protein, 7 aa, Artificial sequence
  synthetic sequence
  misc_feature (1)..(7): Xaa can be any naturally occurring amino acid
XXXXXXX

SEQ ID NO: 424 - protein, 7 aa, Artificial sequence
  synthetic sequence
  misc_feature (1)..(7): Xaa can be any naturally occurring amino acid
XXXXXXX

SEQ ID NO: 425 - protein, 7 aa, Artificial sequence
  synthetic sequence
  misc_feature (1)..(7): Xaa can be any naturally occurring amino acid
XXXXXXX

SEQ ID NO: 426 - protein, 7 aa, Artificial sequence
  synthetic sequence
  misc_feature (1)..(7): Xaa can be any naturally occurring amino acid
XXXXXXX

SEQ ID NO: 427 - protein, 7 aa, Artificial sequence
  synthetic sequence
  misc_feature (1)..(7): Xaa can be any naturally occurring amino acid
XXXXXXX

SEQ ID NO: 428 - protein, 7 aa, Artificial sequence
  synthetic sequence
  misc_feature (1)..(7): Xaa can be any naturally occurring amino acid
XXXXXXX

SEQ ID NO: 429 - protein, 7 aa, Artificial sequence
  synthetic sequence
  misc_feature (1)..(7): Xaa can be any naturally occurring amino acid
XXXXXXX

SEQ ID NO: 430 - protein, 7 aa, Artificial sequence
  synthetic sequence
  misc_feature (1)..(7): Xaa can be any naturally occurring amino acid
XXXXXXX

SEQ ID NO: 431 - protein, 7 aa, Artificial sequence
  synthetic sequence
  misc_feature (1)..(7): Xaa can be any naturally occurring amino acid
XXXXXXX

SEQ ID NO: 432 - protein, 7 aa, Artificial sequence
  synthetic sequence
  misc_feature (1)..(7): Xaa can be any naturally occurring amino acid
XXXXXXX

SEQ ID NO: 433 - protein, 7 aa, Artificial sequence
  synthetic sequence
  misc_feature (1)..(7): Xaa can be any naturally occurring amino acid
XXXXXXX

SEQ ID NO: 434 - protein, 7 aa, Artificial sequence
  synthetic sequence
  misc_feature (1)..(7): Xaa can be any naturally occurring amino acid
XXXXXXX

SEQ ID NO: 435 - protein, 7 aa, Artificial sequence
  synthetic sequence
  misc_feature (1)..(7): Xaa can be any naturally occurring amino acid
XXXXXXX

SEQ ID NO: 436 - protein, 7 aa, Artificial sequence
  synthetic sequence
  misc_feature (1)..(7): Xaa can be any naturally occurring amino acid
XXXXXXX

SEQ ID NO: 437 - protein, 7 aa, Artificial sequence
  synthetic sequence
  misc_feature (1)..(7): Xaa can be any naturally occurring amino acid
XXXXXXX

SEQ ID NO: 438 - protein, 7 aa, Artificial sequence
  synthetic sequence
  misc_feature (1)..(7): Xaa can be any naturally occurring amino acid
XXXXXXX

SEQ ID NO: 439 - protein, 7 aa, Artificial sequence
  synthetic sequence
  misc_feature (1)..(7): Xaa can be any naturally occurring amino acid
XXXXXXX

SEQ ID NO: 440 - protein, 7 aa, Artificial sequence
  synthetic sequence
  misc_feature (1)..(7): Xaa can be any naturally occurring amino acid
XXXXXXX

SEQ ID NO: 441 - protein, 7 aa, Artificial sequence
  synthetic sequence
  misc_feature (1)..(7): Xaa can be any naturally occurring amino acid
XXXXXXX

SEQ ID NO: 442 - protein, 7 aa, Artificial sequence
  synthetic sequence
  misc_feature (1)..(7): Xaa can be any naturally occurring amino acid
XXXXXXX

SEQ ID NO: 443 - protein, 7 aa, Artificial sequence
  synthetic sequence
  misc_feature (1)..(7): Xaa can be any naturally occurring amino acid
XXXXXXX

SEQ ID NO: 444 - protein, 7 aa, Artificial sequence
  synthetic sequence
  misc_feature (1)..(7): Xaa can be any naturally occurring amino acid
XXXXXXX

SEQ ID NO: 445 - protein, 7 aa, Artificial sequence
  synthetic sequence
  misc_feature (1)..(7): Xaa can be any naturally occurring amino acid
XXXXXXX

SEQ ID NO: 446 - protein, 7 aa, Artificial sequence
  synthetic sequence
  misc_feature (1)..(7): Xaa can be any naturally occurring amino acid
XXXXXXX

SEQ ID NO: 447 - protein, 7 aa, Artificial sequence
  synthetic sequence
  misc_feature (1)..(7): Xaa can be any naturally occurring amino acid
XXXXXXX

SEQ ID NO: 448 - protein, 7 aa, Artificial sequence
  synthetic sequence
  misc_feature (1)..(7): Xaa can be any naturally occurring amino acid
XXXXXXX

SEQ ID NO: 449 - protein, 609 aa, Artificial sequence
  synthetic sequence
MKWVESIFLIFLLNFTESRTLHRNEYGIASILDSYQCTAEISLADLATIFFAQFVQEATYKEVSKMVKDALTAIEKPTGDEQSSGCLENQLPAFLEELCHEKEILEKYGHSDCCSQSEEGRHNCFLAHKKPTPASIPLFQVPEPVTSCEAYEEDRETFMNKFIYEIARRHPFLYAPTILLWAARYDKIIPSCCKAENAVECFQTKAATVTKELRESSLLNQHACAVMKNFGTRTFQAITVTKLSQKFTKVNFTEIQKLVLDVAHVHEHCCRGDVLDCLQDGEKIMSYICSQQDTLSNKITECCKLTTLERGQCIIHAENDEKPEGLSPNLNRFLGDRDFNQFSSGEKNIFLASFVHEYSRRHPQLAVSVILRVAKGYQELLEKCFQTENPLECQDKGEEELQKYIQESQALAKRSCGLFQKLGEYYLQNAFLVAYTKKAPQLTSSELMAITRKMAATAATCCQLSEDKLLACGEGAADIIIGHLCIRHEMTPVNPGVGQCCTSSYANRRPCFSSLVVDETYVPPAFSDDKFIFHKDLCQAQGVALQTMKQEFLINLVKQKPQITEEQLEAVIADFSGLLEKCCQGQEQEVCFAEEGQKLISKTRAALGV

SEQ ID NO: 450 - protein, 507 aa, Artificial sequence
  synthetic sequence
GSHSMRYFSTSVSRPGRGEPRFIAVGYVDDTQFVRFDSDAASQRMEPRAPWIEQEGPEYWDEETGKVKAHSQTDRENLRIALRAYNQSEAGSHTLQMMFGCDVGSDGRFLRGYHQYAYDGKDYIALKEDLRSWTAADMAAQITKRKWEAAHVAEQQRAYLEGTCVDGLRRYLENGKETLQRTDPPKTHMTHHPISDHEATLRCWALGFYPAEITLTWQRDGEDQTQDTELVETRPCGDGTFQKWAAVVVPSGEEQRYTCHVQHEGLPKPLTLRWEAAAGGDKTHTCPPCPAPEAAGGPSVFLFPPKPKDTLMISRTPEVTCVVVDVSHEDPEVKFNWYVDGVEVHNAKTKPREEQYNSTYRVVSVLTVLHQDWLNGKEYKCKVSNKALPAPIEKTISKAKGQPREPQVYTLPPSREEMTKNQVSLTCLVKGFYPSDIAVEWESNGQPENNYKTTPPVLDSDGSFFLYSKLTVDKSRWQQGNVFSCSVMHEALHNHYTQKSLSLSPGK

SEQ ID NO: 451 - protein, 817 aa, Artificial sequence
  synthetic sequence
GSHSMRYFSTSVSRPGRGEPRFIAVGYVDDTQFVRFDSDAASQRMEPRAPWIEQEGPEYWDEETGKVKAHSQTDRENLRIALRAYNQSEAGSHTLQMMFGCDVGSDGRFLRGYHQYAYDGKDYIALKEDLRSWTAADMAAQITKRKWEAAHVAEQQRAYLEGTCVDGLRRYLENGKETLQRTDPPKTHMTHHPISDHEATLRCWALGFYPAEITLTWQRDGEDQTQDTELVETRPCGDGTFQKWAAVVVPSGEEQRYTCHVQHEGLPKPLTLRWEGGGGSGGGGSGGGGSAPTSSSTKKTQLQLEALLLDLQMILNGINNYKNPKLTRMLTAKFYMPKKATELKHLQCLEEELKPLEEVLNLAQSKNFHLRPRDLISNINVIVLELKGSETTFMCEYADETATIVEFLNRWITFCQSIISTLTGGGGSGGGGSGGGGSGGGGSAPTSSSTKKTQLQLEALLLDLQMILNGINNYKNPKLTRMLTAKFYMPKKATELKHLQCLEEELKPLEEVLNLAQSKNFHLRPRDLISNINVIVLELKGSETTFMCEYADETATIVEFLNRWITFCQSIISTLTGGGGSGGGGSGGGGSDKTHTCPPCPAPEAAGGPSVFLFPPKPKDTLMISRTPEVTCVVVDVSHEDPEVKFNWYVDGVEVHNAKTKPREEQYNSTYRVVSVLTVLHQDWLNGKEYKCKVSNKALPAPIEKTISKAKGQPREPQVYTLPPSREEMTKNQVSLTCLVKGFYPSDIAVEWESNGQPENNYKTTPPVLDSDGSFFLYSKLTVDKSRWQQGNVFSCSVMHEALHNHYTQKSLSLSPG

SEQ ID NO: 452 - protein, 813 aa, Artificial sequence
  synthetic sequence
APTSSSTKKTQLQLEALLLDLQMILNGINNYKNPKLTRMLTAKFYMPKKATELKHLQCLEEELKPLEEVLNLAQSKNFHLRPRDLISNINVIVLELKGSETTFMCEYADETATIVEFLNRWITFCQSIISTLTGGGGSGGGGSGGGGSGGGGSAPTSSSTKKTQLQLEALLLDLQMILNGINNYKNPKLTRMLTAKFYMPKKATELKHLQCLEEELKPLEEVLNLAQSKNFHLRPRDLISNINVIVLELKGSETTFMCEYADETATIVEFLNRWITFCQSIISTLTGGGGSGGGGSGGGGSGGGGSGSHSMRYFSTSVSRPGRGEPRFIAVGYVDDTQFVRFDSDAASQRMEPRAPWIEQEGPEYWDEETGKVKAHSQTDRENLRIALRAYNQSEAGSHTLQMMFGCDVGSDGRFLRGYHQYAYDGKDYIALKEDLRSWTAADMAAQITKRKWEAAHVAEQQRAYLEGTCVDGLRRYLENGKETLQRTDPPKTHMTHHPISDHEATLRCWALGFYPAEITLTWQRDGEDQTQDTELVETRPCGDGTFQKWAAVVVPSGEEQRYTCHVQHEGLPKPLTLRWEAAAGGDKTHTCPPCPAPEAAGGPSVFLFPPKPKDTLMISRTPEVTCVVVDVSHEDPEVKFNWYVDGVEVHNAKTKPREEQYNSTYRVVSVLTVLHQDWLNGKEYKCKVSNKALPAPIEKTISKAKGQPREPQVYTLPPSREEMTKNQVSLTCLVKGFYPSDIAVEWESNGQPENNYKTTPPVLDSDGSFFLYSKLTVDKSRWQQGNVFSCSVMHEALHNHYTQKSLSLSPGK

SEQ ID NO: 453 - protein, 123 aa, Artificial sequence
  synthetic sequence
EYSRRHPQLGGGGSGGGGSGGGGSIQRTPKIQVYSCHPAENGKSNFLNCYVSGFHPSDIEVDLLKNGERIEKVEHSDLSFSKDWSFYLLYYTEFTPTEKDEYACRVNHVTLSQPKIVKWDRDM

SEQ ID NO: 454 - protein, 123 aa, Artificial sequence
  synthetic sequence
KYIQESQALGGGGSGGGGSGGGGSIQRTPKIQVYSCHPAENGKSNFLNCYVSGFHPSDIEVDLLKNGERIEKVEHSDLSFSKDWSFYLLYYTEFTPTEKDEYACRVNHVTLSQPKIVKWDRDM

SEQ ID NO: 455 - protein, 123 aa, Artificial sequence
  synthetic sequence
RSCGLFQKLGGGGSGGGGSGGGGSIQRTPKIQVYSCHPAENGKSNFLNCYVSGFHPSDIEVDLLKNGERIEKVEHSDLSFSKDWSFYLLYYTEFTPTEKDEYACRVNHVTLSQPKIVKWDRDM

SEQ ID NO: 456 - protein, 123 aa, Artificial sequence
  synthetic sequence
EYYLQNAFLGGGGSGGGGSGGGGSIQRTPKIQVYSCHPAENGKSNFLNCYVSGFHPSDIEVDLLKNGERIEKVEHSDLSFSKDWSFYLLYYTEFTPTEKDEYACRVNHVTLSQPKIVKWDRDM

SEQ ID NO: 457 - protein, 123 aa, Artificial sequence
  synthetic sequence
AYTKKAPQLGGGGSGGGGSGGGGSIQRTPKIQVYSCHPAENGKSNFLNCYVSGFHPSDIEVDLLKNGERIEKVEHSDLSFSKDWSFYLLYYTEFTPTEKDEYACRVNHVTLSQPKIVKWDRDM

SEQ ID NO: 458 - protein, 424 aa, Artificial sequence
  synthetic sequence
APTSSSTKKTQLQLEALLLDLQMILNGINNYKNPKLTRMLTAKFYMPKKATELKHLQCLEEELKPLEEVLNLAQSKNFHLRPRDLISNINVIVLELKGSETTFMCEYADETATIVEFLNRWITFCQSIISTLTGGGGSGGGGSGGGGSGGGGSAPTSSSTKKTQLQLEALLLDLQMILNGINNYKNPKLTRMLTAKFYMPKKATELKHLQCLEEELKPLEEVLNLAQSKNFHLRPRDLISNINVIVLELKGSETTFMCEYADETATIVEFLNRWITFCQSIISTLTGGGGSGGGGSGGGGSKYIQESQALGGGGSGGGGSGGGGSIQRTPKIQVYSCHPAENGKSNFLNCYVSGFHPSDIEVDLLKNGERIEKVEHSDLSFSKDWSFYLLYYTEFTPTEKDEYACRVNHVTLSQPKIVKWDRDM

SEQ ID NO: 459 - protein, 424 aa, Artificial sequence
  synthetic sequence
KYIQESQALGGGGSGGGGSGGGGSIQRTPKIQVYSCHPAENGKSNFLNCYVSGFHPSDIEVDLLKNGERIEKVEHSDLSFSKDWSFYLLYYTEFTPTEKDEYACRVNHVTLSQPKIVKWDRDMGGGGSGGGGSGGGGSAPTSSSTKKTQLQLEALLLDLQMILNGINNYKNPKLTRMLTAKFYMPKKATELKHLQCLEEELKPLEEVLNLAQSKNFHLRPRDLISNINVIVLELKGSETTFMCEYADETATIVEFLNRWITFCQSIISTLTGGGGSGGGGSGGGGSGGGGSAPTSSSTKKTQLQLEALLLDLQMILNGINNYKNPKLTRMLTAKFYMPKKATELKHLQCLEEELKPLEEVLNLAQSKNFHLRPRDLISNINVIVLELKGSETTFMCEYADETATIVEFLNRWITFCQSIISTLT

SEQ ID NO: 460 - protein, 807 aa, Artificial sequence
  synthetic sequence
GSHSMRYFSTSVSRPGRGEPRFIAVGYVDDTQFVRFDSDAASQRMEPRAPWIEQEGPEYWDEETGKVKAHSQTDRENLRIALRAYNQSEAGSHTLQMMFGCDVGSDGRFLRGYHQYAYDGKDYIALKEDLRSWTAADMAAQITKRKWEAAHVAEQQRAYLEGTCVDGLRRYLENGKETLQRTDPPKTHMTHHPISDHEATLRCWALGFYPAEITLTWQRDGEDQTQDTELVETRPCGDGTFQKWAAVVVPSGEEQRYTCHVQHEGLPKPLTLRWEAAAGGDKTHTCPPCPAPEAAGGPSVFLFPPKPKDTLMISRTPEVTCVVVDVSHEDPEVKFNWYVDGVEVHNAKTKPREEQYNSTYRVVSVLTVLHQDWLNGKEYKCKVSNKALPAPIEKTISKAKGQPREPQVYTLPPSREEMTKNQVSLTCLVKGFYPSDIAVEWESNGQPENNYKTTPPVLDSDGSFFLYSKLTVDKSRWQQGNVFSCSVMHEALHNHYTQKSLSLSPGGGGGSGGGGSGGGGSAPTSSSTKKTQLQLEALLLDLQMILNGINNYKNPKLTRMLTAKFYMPKKATELKHLQCLEEELKPLEEVLNLAQSKNFHLRPRDLISNINVIVLELKGSETTFMCEYADETATIVEFLNRWITFCQSIISTLTGGGGSGGGGSGGGGSGGGGSAPTSSSTKKTQLQLEALLLDLQMILNGINNYKNPKLTRMLTAKFYMPKKATELKHLQCLEEELKPLEEVLNLAQSKNFHLRPRDLISNINVIVLELKGSETTFMCEYADETATIVEFLNRWITFCQSIISTLT

SEQ ID NO: 461 - protein, 227 aa, Homo sapiens
DKTHTCPPCPAPELLGGPSVFLFPPKPKDTLMISRTPEVTCVVVDVSHEDPEVKFNWYVDGVEVHNAKTKPREEQYNSTYRVVSVLTVLHQDWLNGKEYKCKVSNKALPAPIEKTISKAKGQPREPQVYTLPPSRDELTKNQVSLTCLVKGFYPSDIAVEWESNGQPENNYKTTPPVLDSDGSFFLYSKLTVDKSRWQQGNVFSCSVMHEALHNHYTQKSLSLSPGK

SEQ ID NO: 462 - protein, 325 aa, Homo sapiens
STKGPSVFPLAPCSRSTSESTAALGCLVKDYFPEPVTVSWNSGALTSGVHTFPAVLQSSGLYSLSSVVTVPSSNFGTQTYTCNVDHKPSNTKVDKTVERKCCVECPPCPAPPVAGPSVFLFPPKPKDTLMISRTPEVTCVVVDVSHEDPEVQFNWYVDGVEVHNAKTKPREEQFNSTFRVVSVLTVVHQDWLNGKEYKCKVSNKGLPAPIEKTISKTKGQPREPQVYTLPPSREEMTKNQVSLTCLVKGFYPSDIAVEWESNGQPENNYKTTPPMLDSDGSFFLYSKLTVDKSRWQQGNVFSCSVMHEALHNHYTQKSLSLSPGK

SEQ ID NO: 463 - protein, 246 aa, Homo sapiens
HKPSNTKVDKRVELKTPLGDTTHTCPPCPAPELLGGPSVFLFPPKPKDTLMISRTPEVTCVVVDVSHEDPEVKFNWYVDGVEVHNAKTKPREEQYNSTYRVVSVLTVLHQDWLNGKEYKCKVSNKALPAPIEKTISKAKGQPREPQVYTLPPSRDELTKNQVSLTCLVKGFYPSDIAVEWESNGQPENNYKTTPPVLDSDGSFFLYSKLTVDKSRWQQGNVFSCSVMHEALHNHYTQKSLSLSPGK

SEQ ID NO: 464 - protein, 383 aa, Homo sapiens
PTKAPDVFPIISGCRHPKDNSPVVLACLITGYHPTSVTVTWYMGTQSQPQRTFPEIQRRDSYYMTSSQLSTPLQQWRQGEYKCVVQHTASKSKKEIFRWPESPKAQASSVPTAQPQAEGSLAKATTAPATTRNTGRGGEEKKKEKEKEEQEERETKTPECPSHTQPLGVYLLTPAVQDLWLRDKATFTCFVVGSDLKDAHLTWEVAGKVPTGGVEEGLLERHSNGSQSQHSRLTLPRSLWNAGTSVTCTLNHPSLPPQRLMALREPAAQAPVKLSLNLLASSDPPEAASWLLCEVSGFSPPNILLMWLEDQREVNTSGFAPARPPPQPRSTTFWAWSVLRVPAPPSPQPATYTCVVSHEDSRTLLNASRSLEVSYVTDHGPMK

SEQ ID NO: 465 - protein, 276 aa, Homo sapiens
VTSTLTIKZSDWLGESMFTCRVDHRGLTFQQNASSMCVPDQDTAIRVFAIPPSFASIFLTKSTKLTCLVTDLTTYBSVTISWTREENGAVKTHTNISESHPNATFSAVGEASICEDBDWSGERFTCTVTHTDLPSPLKQTISRPKGVALHRPBVYLLPPARZZLNLRESATITCLVTGFSPADVFVEWMQRGEPLSPQKYVTSAPMPEPQAPGRYFAHSILTVSEEEWNTGGTYTCVVAHEALPNRVTERTVDKSTGKPTLYNVSLVMSDTAGTCY

SEQ ID NO: 466 - protein, 353 aa, Homo sapiens
ASPTSPKVFPLSLCSTQPDGNVVIACLVQGFFPQEPLSVTWSESGQGVTARNFPPSQDASGDLYTTSSQLTLPATQCLAGKSVTCHVKHYTNPSQDVTVPCPVPSTPPTPSPSTPPTPSPSCCHPRLSLHRPALEDLLLGSEANLTCTLTGLRDASGVTFTWTPSSGKSAVQGPPERDLCGCYSVSSVLPGCAEPWNHGKTFTCTAAYPESKTPLTATLSKSGNTFRPEVHLLPPPSEELALNELVTLTCLARGFSPKDVLVRWLQGSQELPREKYLTWASRQEPSQGTTTFAVTSILRVAAEDWKKGDTFSCMVGHEALPLAFTQKTIDRLAGKPTHVNVSVVMAEVDGTCY

SEQ ID NO: 467 - protein, 222 aa, Homo sapiens
ADPCDSNPRGVSAYLSRPSPFDLFIRKSPTITCLVVDLAPSKGTVNLTWSRASGKPVNHSTRKEEKQRNGTLTVTSTLPVGTRDWIEGETYQCRVTHPHLPRALMRSTTKTSGPRAAPEVYAFATPEWPGSRDKRTLACLIQNFMPEDISVQWLHNEVQLPDARHSTTQPRKTKGSGFFVFSRLEVTRAEWEQKDEFICRAVHEAASPSQTVQRAVSVNPGK

SEQ ID NO: 468 - protein, 327 aa, Homo sapiens
ASTKGPSVFPLAPCSRSTSESTAALGCLVKDYFPEPVTVSWNSGALTSGVHTFPAVLQSSGLYSLSSVVTVPSSSLGTKTYTCNVDHKPSNTKVDKRVESKYGPPCPSCPAPEFLGGPSVFLFPPKPKDTLMISRTPEVTCVVVDVSQEDPEVQFNWYVDGVEVHNAKTKPREEQFNSTYRVVSVLTVLHQDWLNGKEYKCKVSNKGLPSSIEKTISKAKGQPREPQVYTLPPSQEEMTKNQVSLTCLVKGFYPSDIAVEWESNGQPENNYKTTPPVLDSDGSFFLYSRLTVDKSRWQEGNVFSCSVMHEALHNHYTQKSLSLSLGK

SEQ ID NO: 469 - protein, 227 aa, Homo sapiens
DKTHTCPPCPAPELLGGPSVFLFPPKPKDTLMISRTPEVTCVVVDVSHEDPEVKFNWYVDGVEVHNAKTKPREEQYNSTYRVVSVLTVLHQDWLNGKEYKCKVSNKALPAPIEKTISKAKGQPREPQVYTLPPSREEMTKNQVSLTCLVKGFYPSDIAVEWESNGQPENNYKTTPPVLDSDGSFFLYSKLTVDKSRWQQGNVFSCSVMHEALHNHYTQKSLSLSPGK

SEQ ID NO: 470 - protein, 227 aa, Artificial sequence
  synthetic sequence
DKTHTCPPCPAPEFEGGPSVFLFPPKPKDTLMISRTPEVTCVVVDVSHEDPEVKFNWYVDGVEVHNAKTKPREEQYNSTYRVVSVLTVLHQDWLNGKEYKCKVSNKALPASIEKTISKAKGQPREPQVYTLPPSREEMTKNQVSLTCLVKGFYPSDIAVEWESNGQPENNYKTTPPVLDSDGSFFLYSKLTVDKSRWQQGNVFSCSVMHEALHNHYTQKSLSLSPGK

SEQ ID NO: 471 - protein, 227 aa, Artificial sequence
  synthetic sequence
DKTHTCPPCPAPELLGGPSVFLFPPKPKDTLMISRTPEVTCVVVDVSHEDPEVKFNWYVDGVEVHNAKTKPREEQYASTYRVVSVLTVLHQDWLNGKEYKCKVSNKALPAPIEKTISKAKGQPREPQVYTLPPSREEMTKNQVSLTCLVKGFYPSDIAVEWESNGQPENNYKTTPPVLDSDGSFFLYSKLTVDKSRWQQGNVFSCSVMHEALHNHYTQKSLSLSPGK

SEQ ID NO: 472 - protein, 227 aa, Artificial sequence
  synthetic sequence
DKTHTCPPCPAPEAAGGPSVFLFPPKPKDTLMISRTPEVTCVVVDVSHEDPEVKFNWYVDGVEVHNAKTKPREEQYNSTYRVVSVLTVLHQDWLNGKEYKCKVSNKALPAPIEKTISKAKGQPREPQVYTLPPSREEMTKNQVSLTCLVKGFYPSDIAVEWESNGQPENNYKTTPPVLDSDGSFFLYSKLTVDKSRWQQGNVFSCSVMHEALHNHYTQKSLSLSPGK

SEQ ID NO: 473 - protein, 813 aa, Artificial sequence
  synthetic sequence
APTSSSTKKTQLQLEALLLDLQMILNGINNYKNPKLTRMLTAKFYMPKKATELKHLQCLEEELKPLEEVLNLAQSKNFHLRPRDLISNINVIVLELKGSETTFMCEYADETATIVEFLNRWITFCQSIISTLTGGGGSGGGGSGGGGSGGGGSAPTSSSTKKTQLQLEALLLDLQMILNGINNYKNPKLTRMLTAKFYMPKKATELKHLQCLEEELKPLEEVLNLAQSKNFHLRPRDLISNINVIVLELKGSETTFMCEYADETATIVEFLNRWITFCQSIISTLTGGGGSGGGGSGGGGSGGGGSGSHSMRYFFTSVSRPGRGEPRFIAVGYVDDTQFVRFDSDAASQRMEPRAPWIEQEGPEYWDGETRKVKAHSQTHRVDLGTLRGCYNQSEAGSHTVQRMYGCDVGSDWRFLRGYHQYAYDGKDYIALKEDLRSWTAADMAAQTTKHKWEAAHVAEQLRAYLEGTCVEWLRRYLENGKETLQRTDAPKTHMTHHAVSDHEATLRCWALSFYPAEITLTWQRDGEDQTQDTELVETRPCGDGTFQKWAAVVVPSGQEQRYTCHVQHEGLPKPLTLRWEAAAGGDKTHTCPPCPAPEAAGGPSVFLFPPKPKDTLMISRTPEVTCVVVDVSHEDPEVKFNWYVDGVEVHNAKTKPREEQYNSTYRVVSVLTVLHQDWLNGKEYKCKVSNKALPAPIEKTISKAKGQPREPQVYTLPPSREEMTKNQVSLTCLVKGFYPSDIAVEWESNGQPENNYKTTPPVLDSDGSFFLYSKLTVDKSRWQQGNVFSCSVMHEALHNHYTQKSLSLSPGK

SEQ ID NO: 474 - protein, 123 aa, Artificial sequence
  synthetic sequence
FMNKFIYEIGCGGSGGGGSGGGGSIQRTPKIQVYSCHPAENGKSNFLNCYVSGFHPSDIEVDLLKNGERIEKVEHSDLSFSKDWSFYLLYYTEFTPTEKDEYACRVNHVTLSQPKIVKWDRDM

SEQ ID NO: 475 - protein, 812 aa, Artificial sequence
  synthetic sequence
APTSSSTKKTQLQLEALLLDLQMILNGINNYKNPKLTRMLTAKFYMPKKATELKHLQCLEEELKPLEEVLNLAQSKNFHLRPRDLISNINVIVLELKGSETTFMCEYADETATIVEFLNRWITFCQSIISTLTGGGGSGGGGSGGGGSGGGGSAPTSSSTKKTQLQLEALLLDLQMILNGINNYKNPKLTRMLTAKFYMPKKATELKHLQCLEEELKPLEEVLNLAQSKNFHLRPRDLISNINVIVLELKGSETTFMCEYADETATIVEFLNRWITFCQSIISTLTGGGGSGGGGSGGGGSGGGGSGSHSMRYFFTSVSRPGRGEPRFIAVGYVDDTQFVRFDSDAASQRMEPRAPWIEQEGPEYWDGETRKVKAHSQTHRVDLGTLRGCYNQSEAGSHTVQRMYGCDVGSDWRFLRGYHQYAYDGKDYIALKEDLRSWTAADMAAQTTKHKWEAAHVAEQLRAYLEGTCVEWLRRYLENGKETLQRTDAPKTHMTHHAVSDHEATLRCWALSFYPAEITLTWQRDGEDQTQDTELVETRPAGDGTFQKWAAVVVPSGQEQRYTCHVQHEGLPKPLTLRWEAAAGGDKTHTCPPCPAPEAAGGPSVFLFPPKPKDTLMISRTPEVTCVVVDVSHEDPEVKFNWYVDGVEVHNAKTKPREEQYNSTYRVVSVLTVLHQDWLNGKEYKCKVSNKALPAPIEKTISKAKGQPREPQVYTLPPSREEMTKNQVSLTCLVKGFYPSDIAVEWESNGQPENNYKTTPPVLDSDGSFFLYSKLTVDKSRWQQGNVFSCSVMHEALHNHYTQKSLSLSPG

SEQ ID NO: 476 - protein, 123 aa, Artificial sequence
  synthetic sequence
FMNKFIYEIGCGGSGGGGSGGGGSIQRTPKIQVYSRHPAENGKSNFLNCYVSGFHPSDIEVDLLKNGERIEKVEHSDLSFSKDWSFYLLYYTEFTPTEKDEYACRVNHVTLSQPKIVKWDRDM

SEQ ID NO: 477 - protein, 813 aa, Artificial sequence
  synthetic sequence
APTSSSTKKTQLQLEALLLDLQMILNGINNYKNPKLTRMLTAKFYMPKKATELKHLQCLEEELKPLEEVLNLAQSKNFHLRPRDLISNINVIVLELKGSETTFMCEYADETATIVEFLNRWITFCQSIISTLTGGGGSGGGGSGGGGSGGGGSAPTSSSTKKTQLQLEALLLDLQMILNGINNYKNPKLTRMLTAKFYMPKKATELKHLQCLEEELKPLEEVLNLAQSKNFHLRPRDLISNINVIVLELKGSETTFMCEYADETATIVEFLNRWITFCQSIISTLTGGGGSGGGGSGGGGSGGGGSGSHSMRYFFTSVSRPGRGEPRFIAVGYVDDTQFVRFDSDAASQRMEPRAPWIEQEGPEYWDGETRKVKAHSQTHRVDLGTLRGAYNQSEAGSHTVQRMYGCDVGSDWRFLRGYHQYAYDGKDYIALKEDLRSWTAADMAAQTTKHKWEAAHVAEQLRAYLEGTCVEWLRRYLENGKETLQRTDAPKTHMTHHAVSDHEATLRCWALSFYPAEITLTWQRDGEDQTQDTELVETRPCGDGTFQKWAAVVVPSGQEQRYTCHVQHEGLPKPLTLRWEAAAGGDKTHTCPPCPAPEAAGGPSVFLFPPKPKDTLMISRTPEVTCVVVDVSHEDPEVKFNWYVDGVEVHNAKTKPREEQYNSTYRVVSVLTVLHQDWLNGKEYKCKVSNKALPAPIEKTISKAKGQPREPQVYTLPPSREEMTKNQVSLTCLVKGFYPSDIAVEWESNGQPENNYKTTPPVLDSDGSFFLYSKLTVDKSRWQQGNVFSCSVMHEALHNHYTQKSLSLSPGK

SEQ ID NO: 478 - protein, 123 aa, Artificial sequence
  synthetic sequence
FMNKFIYEIGGGGSGGGGSGGGGSIQRTPKIQVYSCHPAENGKSNFLNCYVSGFHPSDIEVDLLKNGERIEKVEHSDLSFSKDWSFYLLYYTEFTPTEKDEYACRVNHVTLSQPKIVKWDRDM

SEQ ID NO: 479 - protein, 9 aa, Artificial sequence
  synthetic sequence
AITRKMAAT

SEQ ID NO: 480 - protein, 9 aa, Artificial sequence
  synthetic sequence
AYTKKAPQL

SEQ ID NO: 481 - protein, 9 aa, Artificial sequence
  synthetic sequence
LLNQHACAV

SEQ ID NO: 482 - protein, 9 aa, Artificial sequence
  synthetic sequence
KLVLDVAHV

SEQ ID NO: 483 - protein, 9 aa, Artificial sequence
  synthetic sequence
FMNKFIYEI

SEQ ID NO: 484 - protein, 9 aa, Artificial sequence
  synthetic sequence
SIPLFQVPE

SEQ ID NO: 485 - protein, 9 aa, Artificial sequence
  synthetic sequence
LLNFTESRT

SEQ ID NO: 486 - protein, 9 aa, Artificial sequence
  synthetic sequence
FVQEATYKF

SEQ ID NO: 487 - protein, 9 aa, Artificial sequence
  synthetic sequence
ATYKEVSKM

SEQ ID NO: 488 - protein, 9 aa, Artificial sequence
  synthetic sequence
KEVSKMVKD

SEQ ID NO: 489 - protein, 9 aa, Artificial sequence
  synthetic sequence
RHNCFLAHK

SEQ ID NO: 490 - protein, 9 aa, Artificial sequence
  synthetic sequence
ATAATCCQL

SEQ ID NO: 491 - protein, 9 aa, Artificial sequence
  synthetic sequence
YIQESQALA

SEQ ID NO: 492 - protein, 10 aa, Artificial sequence
  synthetic sequence
QLTSSELMAI

SEQ ID NO: 493 - protein, 9 aa, Artificial sequence
  synthetic sequence
KLSQKFTKV

SEQ ID NO: 494 - protein, 9 aa, Artificial sequence
  synthetic sequence
KELRESSLL

SEQ ID NO: 495 - protein, 9 aa, Artificial sequence
  synthetic sequence
SLVVDETYV

SEQ ID NO: 496 - protein, 9 aa, Artificial sequence
  synthetic sequence
ILLWAARYD

SEQ ID NO: 497 - protein, 9 aa, Artificial sequence
  synthetic sequence
KIIPSCCKA

SEQ ID NO: 498 - protein, 9 aa, Artificial sequence
  synthetic sequence
CRGDVLDCL

SEQ ID NO: 499 - protein, 9 aa, Artificial sequence
  synthetic sequence
QQDTLSNKI

SEQ ID NO: 500 - protein, 10 aa, Artificial sequence
  synthetic sequence
TMKQEFLINL

SEQ ID NO: 501 - protein, 9 aa, Artificial sequence
  synthetic sequence
NLVKQKPQI

SEQ ID NO: 502 - protein, 9 aa, Artificial sequence
  synthetic sequence
AVIADFSGL

SEQ ID NO: 503 - protein, 9 aa, Artificial sequence
  synthetic sequence
LLACGEGAA

SEQ ID NO: 504 - protein, 9 aa, Artificial sequence
  synthetic sequence
LACGEGAAD

SEQ ID NO: 505 - protein, 10 aa, Artificial sequence
  synthetic sequence
KAPQLTSSEL

SEQ ID NO: 506 - protein, 9 aa, Artificial sequence
  synthetic sequence
YICSQQDTL

SEQ ID NO: 507 - protein, 9 aa, Artificial sequence
  synthetic sequence
TECCKLTTL

SEQ ID NO: 508 - protein, 10 aa, Artificial sequence
  synthetic sequence
CTAEISLADL

SEQ ID NO: 509 - protein, 10 aa, Artificial sequence
  synthetic sequence
VTKELRESSL

SEQ ID NO: 510 - protein, 10 aa, Artificial sequence
  synthetic sequence
IMSYICSQQD

SEQ ID NO: 511 - protein, 9 aa, Artificial sequence
  synthetic sequence
TRTFQAITV

SEQ ID NO: 512 - protein, 9 aa, Artificial sequence
  synthetic sequence
FQKLGEYYL

SEQ ID NO: 513 - protein, 9 aa, Artificial sequence
  synthetic sequence
RVAKGYQEL

SEQ ID NO: 514 - protein, 10 aa, Artificial sequence
  synthetic sequence
SYQCTAEISL

SEQ ID NO: 515 - protein, 9 aa, Artificial sequence
  synthetic sequence
KQEFLINLV

SEQ ID NO: 516 - protein, 9 aa, Artificial sequence
  synthetic sequence
MKWVESIFL

SEQ ID NO: 517 - protein, 9 aa, Artificial sequence
  synthetic sequence
PVNPGVGQC

SEQ ID NO: 518 - protein, 9 aa, Artificial sequence
  synthetic sequence
AADIIIGHL

SEQ ID NO: 519 - protein, 9 aa, Artificial sequence
  synthetic sequence
QVPEPVTSC

SEQ ID NO: 520 - protein, 10 aa, Artificial sequence
  synthetic sequence
TTLERGQCII

SEQ ID NO: 521 - protein, 9 aa, Artificial sequence
  synthetic sequence
KMAATAATC

SEQ ID NO: 522 - protein, 10 aa, Artificial sequence
  synthetic sequence
QAQGVALQTM

SEQ ID NO: 523 - protein, 9 aa, Artificial sequence
  synthetic sequence
FQAITVTKL

SEQ ID NO: 524 - protein, 9 aa, Artificial sequence
  synthetic sequence
LLEKCFQTE

SEQ ID NO: 525 - protein, 9 aa, Artificial sequence
  synthetic sequence
VAYTKKAPQ

SEQ ID NO: 526 - protein, 9 aa, Artificial sequence
  synthetic sequence
KYIQESQAL

SEQ ID NO: 527 - protein, 9 aa, Artificial sequence
  synthetic sequence
GVALQTMKQ

SEQ ID NO: 528 - protein, 9 aa, Artificial sequence
  synthetic sequence
GQEQEVCFA

SEQ ID NO: 529 - protein, 10 aa, Artificial sequence
  synthetic sequence
SEEGRHNCFL

SEQ ID NO: 530 - protein, 10 aa, Artificial sequence
  synthetic sequence
RHPFLYAPTI

SEQ ID NO: 531 - protein, 10 aa, Artificial sequence
  synthetic sequence
TEIQKLVLDV

SEQ ID NO: 532 - protein, 10 aa, Artificial sequence
  synthetic sequence
RRHPQLAVSV

SEQ ID NO: 533 - protein, 10 aa, Artificial sequence
  synthetic sequence
GEYYLQNAFL

SEQ ID NO: 534 - protein, 10 aa, Artificial sequence
  synthetic sequence
NRRPCFSSLV

SEQ ID NO: 535 - protein, 10 aa, Artificial sequence
  synthetic sequence
LQTMKQEFLI

SEQ ID NO: 536 - protein, 10 aa, Artificial sequence
  synthetic sequence
IADFSGLLEK

SEQ ID NO: 537 - protein, 10 aa, Artificial sequence
  synthetic sequence
GLLEKCCQGQ

SEQ ID NO: 538 - protein, 9 aa, Artificial sequence
  synthetic sequence
TLSNKITEC

SEQ ID NO: 539 - protein, 10 aa, Artificial sequence
  synthetic sequence
LQDGEKIMSY

SEQ ID NO: 540 - protein, 9 aa, Artificial sequence
  synthetic sequence
GLFQKLGBY

SEQ ID NO: 541 - protein, 10 aa, Artificial sequence
  synthetic sequence
NEYGIASILD

SEQ ID NO: 542 - protein, 10 aa, Artificial sequence
  synthetic sequence
KMVKDALTAI

SEQ ID NO: 543 - protein, 9 aa, Artificial sequence
  synthetic sequence
FLASFVHEY

SEQ ID NO: 544 - protein, 9 aa, Artificial sequence
  synthetic sequence
AQFVQEATY

SEQ ID NO: 545 - protein, 9 aa, Artificial sequence
  synthetic sequence
EYYLQNAFL

SEQ ID NO: 546 - protein, 9 aa, Artificial sequence
  synthetic sequence
EYSRRHPQL

SEQ ID NO: 547 - protein, 9 aa, Artificial sequence
  synthetic sequence
AYEEDRETF

SEQ ID NO: 548 - protein, 9 aa, Artificial sequence
  synthetic sequence
SYANRRPCF

SEQ ID NO: 549 - protein, 9 aa, Artificial sequence
  synthetic sequence
CFAEEGQKL

SEQ ID NO: 550 - protein, 9 aa, Artificial sequence
  synthetic sequence
RSCGLFQKL

SEQ ID NO: 551 - protein, 9 aa, Artificial sequence
  synthetic sequence
IFLIFLLNF

SEQ ID NO: 552 - protein, 9 aa, Artificial sequence
  synthetic sequence
KPEGLSPNL

SEQ ID NO: 553 - protein, 9 aa, Artificial sequence
  synthetic sequence
FMNKFIYEI

SEQ ID NO: 554 - protein, 10 aa, Artificial sequence
  synthetic sequence
GLSPNLNRFL

SEQ ID NO: 555 - protein, 275 aa, Artificial sequence [sequence omitted]

SEQ ID NO: 556 - protein, 275 aa, Artificial sequence; identical to SEQ ID NO: 46
  synthetic sequence
